(19) United States
(12) Patent Application Publication
(10) Pub. No.: US 2019/0200554 A1
(43) Pub. Date: Jul. 4, 2019

(54) Compositions and Methods for Plant Haploid Induction

(71) Applicant: Monsanto Technology LLC, St. Louis, MO (US)

(72) Inventors: Rico A. Caldo, Eureka, MO (US); Paul S. Chomet, Groton, CT (US); Rahul Dhawan, Ballwin, MO (US); Yan Fu, Chesterfield, MO (US); Jonathan Lamb, Wildwood, MO (US); Bryce M. Lemke, Nevada, IA (US); Jeanette M. Peevers, Chesterfield, MO (US)

(21) Appl. No.: 16/325,832

(22) PCT Filed: Aug. 15, 2017
(86) PCT No.: PCT/US17/46837

§ 371 Date: Feb. 15, 2019

Related U.S. Application Data
(60) Provisional application No. 62/375,618, filed on Aug. 16, 2016.

(51) Int. Cl. A01H 1/08

(52) U.S. Cl. CPC A01H 1/08

(57) ABSTRACT

The present invention provides compositions and methods for producing haploid induction. Genetic elements associated with haploid induction, recombinant DNA constructs comprising the genetic elements are also provided. Methods are further provided for generating haploid inducer plants, haploid plants, and doubled haploid plants (including spontaneous diploidization).

### CROSS-REFERENCE TO RELATED APPLICATION

[0001] This application claims priority benefit to U.S. Provisional Patent Application No. 62/375,618, filed on Aug. 16, 2016, which is incorporated herein by reference in its entirety.

### INCORPORATION OF SEQUENCE LISTING

[0002] A computer readable form of a sequence listing is filed with this application by electronic submission and is incorporated into this application by reference in its entirety. The sequence listing is contained in the file named “62110WO_Sequence_Listing_ST25.txt”, which is 1,536,569 bytes in size (measured in operating system MS Windows) and created on Aug. 16, 2016.

### FIELD OF THE INVENTION

[0003] The present invention relates to compositions and methods for producing haploid inducer plants, haploid plants, and doubled haploid plants (including the spontaneous diploidization).

### BACKGROUND

[0004] Plant breeding is greatly facilitated by the use of doubled haploid (DH) plants. The production of doubled haploid plants enables plant breeders to obtain inbred lines without multi-generational inbreeding, thus decreasing the time required to produce homozygous plants. Doubled haploid plants provide an invaluable tool to plant breeders, particularly for generating inbred lines, QTL mapping, cytoplasmic conversions, and trait introgression. Improvement on haploid production and screening are the key components for a successful implementation of the doubled haploid technology in plant breeding programs. Haploids are traditionally generated through an androgenesis or gynogenesis approach (Hiebert, C. et al., Theor Appl Genet 117: 581-594 (2008)). Some plant species such as maize, Arabidopsis, and barley can produce haploids by uniparental genome elimination via a male inducer. In corn, the haploids are generated spontaneously when crossed to the maize inducer lines. Production of haploids using in vivo induction method has been widely adopted for generating new inbred lines however haploid induction rate remains low.

[0005] The molecular mechanisms underlying haploid induction in maize are still unclear. Previous QTL mapping studies for unraveling the genetic architecture of haploid induction detected a major QTL on chromosome 1. The most comprehensive study with four bi-parental populations (Prigge et al., Genetics 190: 781-793 (2012)) mapped this QTL, termed qhir1, to bin 1.04 and hypothesized that it is required for haploid induction, but QTL positions and 1-LOD support intervals differed substantially among populations. In another study with population 1680×UH400, qhir1 was fine-mapped to a 3.57 Mb region between markers umc1917 and bnlg1811, and a 243 kb region was identified with significant effect on haploid induction (Dong et al., Theoretical and Applied Genetics 126: 1713-1720 (2013)). The present invention provides a fine-mapped region (MonI1) that confers maternal haploid induction in maize obtained through high density fine mapping and QTL cloning. The candidate genes and genetic elements associated with haploid induction are also provided for producing haploid inducer plants. The present invention further provides methods for obtaining haploids and doubled haploids (including the spontaneous diploidization) by genetically modifying the presently disclosed candidate genes and genetic elements.

### SUMMARY

[0006] In one aspect of the present invention, a recombinant DNA construct is provided comprising a heterologous promoter functional in a plant cell and operably linked to: a polynucleotide that comprises a nucleotide sequence with at least 90%, at least 91%, at least 92%, at least 93%, at least 94%, at least 95%, at least 96%, at least 97%, at least 98%, at least 99% identity, or 100% identity to a sequence selected from the group consisting of SEQ ID NOs: 1-5, and their complements, or a functional fragment thereof; a polynucleotide that comprises a nucleotide sequence with at least 90%, at least 91%, at least 92%, at least 93%, at least 94%, at least 95%, at least 96%, at least 97%, at least 98%, at least 99% identity, or 100% identity to a sequence selected from the group consisting of SEQ ID NOs: 20-24, 86, 107 and 109; a polynucleotide that encodes a polypeptide having an amino acid sequence with at least 90%, at least 91%, at least 92%, at least 93%, at least 94%, at least 95%, at least 96%, at least 97%, at least 98%, at least 99% identity, or 100% identity to a sequence selected from the group consisting of SEQ ID NOs: 42-46, 108 and 110; or a polynucleotide that comprises a nucleotide sequence that suppresses at least one endogenous target gene having an amino acid sequence with at least 90%, at least 91%, at least 92%, at least 93%, at least 94%, at least 95%, at least 96%, at least 97%, at least 98%, at least 99% identity, or 100% identity to a sequence selected from the group consisting of SEQ ID NOs: 89, 90, 92 and 100-106. The synthetics miRNA sequences SEQ ID NOs: 111 and 112 are also provided for suppressing the corn Mon-DKD2 endogenous genes SEQ ID NO: 87 and SEQ ID NO: 88, respectively. The recombinant DNA construct of the present invention may comprise a combination of two or more nucleotide sequences described above.

[0007] In another aspect of the present invention, transgenic plants, plant cells, plant tissues and plant parts are further provided comprising an insertion of the recombinant DNA construct of the present invention into the genome of such plants, cells, tissues, and plant parts. Transgenic plants of the present invention exhibit haploid induction phenotype when crossed to a non-inducer line, relative to a control or wild type plant not having the recombinant DNA construct.

[0008] In another aspect, the disclosure provides a plant comprising a recombinant DNA construct of the present disclosure, wherein the plant is a progeny, a propagule, or a field crop.

[0009] In another aspect, the disclosure provides a field crop comprising a recombinant DNA construct of the present disclosure, wherein the field crop is selected from the group consisting of corn, soybean, sorghum, cotton, canola, rice, barley, oat, wheat, turf grass, alfalfa, sugar beet, sunflower, quinoa and sugar cane.

[0010] In another aspect, the disclosure provides a propagule comprising a recombinant DNA construct the present disclosure, wherein the propagule is selected from the group consisting of cell, pollen, ovule, flower, embryo, leaf, root, stem, shoot, meristem, grain and seed.

[0011] In another aspect of the present invention, a method for producing a haploid inducer plant is provided comprising (a) transforming at least one cell of an explant with a recombinant DNA construct comprising a nucleotide sequence described above; and (b) regenerating or developing the transgenic plant from the transformed explant. Such methods may further comprise (c) selecting a plant that exhibits haploid induction phenotype when crossed to a non-inducer plant as compared to a control plant not having the recombinant DNA construct.

[0012] In another aspect, the disclosure provides a recombinant DNA construct comprising a donor template, wherein said donor template comprises at least one homology arm flanking a recombinant sequence for modulation of expression of an endogenous gene where said gene is encoded by a polynucleotide that comprises a nucleotide sequence with at least 90%, at least 91%, at least 92%, at least 93%, at least 94%, at least 95%, at least 96%, at least 97%, at least 98%, at least 99% identity, or 100% identity to a sequence selected from the group consisting of SEQ ID NOs: 20-24, 86-88, 91, 93-99, 107 and 109; or a polynucleotide that encodes a polypeptide having an amino acid sequence with at least 90%, at least 91%, at least 92%, at least 93%, at least 94%, at least 95%, at least 96%, at least 97%, at least 98%, at least 99% identity, or 100% identity to a sequence selected from the group consisting of SEQ ID NOs: 42-46, 89-90, 92, 100-106, 108 and 110.

[0013] In another aspect, the disclosure provides a method for obtaining a haploid inducer plant comprising the steps of identifying an endogenous genomic locus corresponding to a gene selected from the group consisting of SEQ ID NOs: 42-46, 89-90, 92, 100-106, 108 and 110, or its homologs; and site-specifically inserting a recombinant sequence capable of modulating expression of said gene.

[0014] In another aspect, the disclosure provides a method for obtaining a haploid inducer plant comprising the steps of: identifying in a non-inducer line the haploid induction region corresponding to the MonI1 regions identified in KHI1; modifying the identified haploid induction region by: deleting the entire or portions of the region; or swapping the entire or portions of the region with the KHI1 haploid induction region; regenerating or developing the transgenic plant comprising the modified haploid induction region in its genome; and selecting a plant that exhibits haploid induction phenotype when crossed to a non-inducer plant.

[0015] In another aspect, the present invention provides a method for obtaining a doubled haploid plant comprising the steps of: crossing the transgenic inducer plants with non-inducer plants of interest to produce haploids; and producing doubled haploid plants by chromosome doubling of the haploids.

[0016] In another aspect, the present invention provides a method for transferring haploid induction effect to new lines comprising the steps of: providing a first plant comprising at least one supernumerary chromosome, wherein the at least one supernumerary chromosome comprises at least one genetic element that can cause haploid induction; crossing the first plant with a second plant of interest; and recovering a third plant resultant from crossing the first plant and second plant, wherein the third plant comprises at least one supernumerary chromosome comprises at least one genetic element that can cause haploid induction.

### BRIEF DESCRIPTION OF THE SEQUENCE LISTING

[0017] SEQ ID NO: 1 is the contiguous DNA sequence formed by the assembly of BAC sequences spanning the extended MonI1 region in corn haploid induction line KHI1.

[0018] SEQ ID NOs: 2-4 are the BAC DNA sequences spanning the MonI1 region in KHI1.

[0019] SEQ ID NO: 5 is the DNA sequence for the MonI1 region in KHI1.

[0020] SEQ ID NO: 6 is the DNA sequence for the MonI1 region in corn B73.

[0021] SEQ ID NOs: 7 and 8 are the marker sequences flanking the MonI1 region in B73.

[0022] SEQ ID NOs: 9-30 are the coding DNA sequences for genes identified in SEQ ID NO: 1.

[0023] SEQ ID NOs: 31-52 are the amino acid sequences encoded by SEQ ID NOs: 9-30, respectively.

[0024] SEQ ID NOs: 53-85 are the DNA sequences for the non-coding RNAs identified in SEQ ID NO: 1.

[0025] SEQ ID NO: 86 is the genomic DNA sequence corresponding to the patatin-like phospholipase (PNPLA) gene (having the protein sequence of SEQ ID NO: 42) identified in the MonI1 region in KHI1.

[0026] SEQ ID NOs: 87 and 88 are the coding DNA sequences for genes identified in the MonI1 region in Mon-DKD2 but not in KHI.

[0027] SEQ ID NOs: 89 and 90 are the protein sequences encoded by SEQ ID NOs: 87 and 88, respectively.

[0028] SEQ ID NOs: 91 is the coding DNA sequence for the PNPLA gene identified in the MonI1 region in B73. SEQ ID NO: 92 is the protein sequence encoded by SEQ ID NO: 91.

[0029] SEQ ID NOs: 93-99 are the coding DNA sequences for genes identified in the MonI1 region in B73 but not in KHI1. SEQ ID NOs: 100-106 are the protein sequence encoded by SEQ ID NOs: 93-99, respectively.

[0030] SEQ ID NO: 107 is the coding DNA sequence for the PNPLA gene in rice. SEQ ID NO: 108 is the protein sequence encoded by SEQ ID NO: 107.

[0031] SEQ ID NO: 109 is the coding DNA sequence for the PNPLA gene in sorghum. SEQ ID NO: 110 is the protein sequence encoded by SEQ ID NO: 107.

[0032] SEQ ID NO: 111 is the synthetic miRNA sequence designed to suppress expression of the target gene (SEQ ID NO: 87) in Mon-DKD2.

[0033] SEQ ID NO: 112 is the synthetic miRNA sequence designed to suppress expression of the target gene (SEQ ID NO: 88) in Mon-DKD2.

### DETAILED DESCRIPTION

[0034] The present invention includes compositions and methods for producing haploid inducer plants, haploids, and doubled haploids (including the spontaneous diploidization). The definitions and methods provided herein define the present invention and guide those of ordinary skill in the art in the practice of the present invention. Without being bound by any theory, compositions and methods of the present invention may operate to achieve and enhance haploid induction effect in plants by genetically modifying the candidate genes and genetic elements disclosed herein.

[0035] As used herein, a “haploid” cell or nucleus comprises a single set of unpaired chromosomes (x). In contrast, a “diploid” cell or nucleus comprises two complete sets of chromosomes (2x) that are capable of homologous pairing. The haploid number of chromosomes can be represented by “n,” and the diploid number of chromosomes can be represented by “2n.” For example, in a diploid species such as corn, n=x=10, and 2n=2x=20. A polyploid cell or nucleus comprises more than two complete sets of chromosomes. For example, some wheat lines are hexaploids, meaning they contain three sets of paired chromosomes (2n=6x=42). Both diploid and polyploid cells and nuclei can be reduced to haploid states.

[0036] As used herein, a plant referred to as “doubled haploid” is developed by doubling the haploid set of chromosomes. In one aspect, a haploid plant provided herein undergoes spontaneous chromosome doubling. Spontaneous chromosome doubling can produce diploid sectors that give rise to normal diploid floral structures. Such spontaneously doubled sectors are desirable because diploid floral structures resulting from spontaneous chromosome doubling produce normal eggs and pollen that can be self-pollinated or used to perform crosses with other plants. A plant or seed that is obtained from a doubled haploid plant that is selfed to any number of generations may still be identified as a doubled haploid plant. A doubled haploid plant is considered a homozygous plant. A plant is considered to be doubled haploid if it is fertile, even if the entire vegetative part of the plant does not consist of the cells with the doubled set of chromosomes; that is, a plant will be considered doubled haploid if it contains viable gametes, even if it is chimeric.

[0037] The present invention provides methods facilitating the production of doubled haploid plants, which entails production of haploids followed by chromosome doubling. First a haploid inducer line is produced using the compositions and methods provided in the present invention. Then one or more lines are crossed with an inducer parent to produce haploids. Selection of haploids can be accomplished by various screening methods based on phenotypic or genotypic characteristics. In one approach, seeds resulting from a cross with an inducer parent are screened with visible marker genes, including anthocyanin genes such as R-nj and fluorescent proteins such as GFP YFP, CFP, DS-Red or CRC, that are detectable in the embryo of a haploid seed, allowing for separation of haploid and diploid seeds. The diploid seeds will contain the marker gene from the haploid inducer parent. Other screening approaches may be applied to plants resulting from the cross with the haploid inducer including chromosome counting, flow cytometry, and genetic marker evaluation can be utilized to infer genome copy number, etc. See U.S. Patent Application Publication No. 2009/0064361, the entire contents and disclosures of which are incorporated herein by reference.

[0038] The resulting haploid has a haploid embryo and a normal triploid endosperm. There are several approaches known in the art to achieve chromosome doubling. Haploid cells, haploid embryos, haploid seeds, haploid seedlings, or haploid plants can be treated with a doubling agent. Non-limiting examples of known doubling agents include nitrousoxide gas, anti-microtubule herbicides, anti-microtubule agents, colchicine, pronamide, and mitotic inhibitors. See U.S. Patent Application Publication No. 2014/0298532, the entire contents and disclosures of which are incorporated herein by reference.

[0039] As used herein, a “locus” is a fixed position on a chromosome and may represent a single nucleotide, a few nucleotides or a large number of nucleotides in a genomic region.

[0040] As used herein, “marker” means a detectable characteristic that can be used to discriminate between organisms. Examples of such characteristics may include genetic markers, protein composition, protein levels, oil composition, oil levels, carbohydrate composition, carbohydrate levels, fatty acid composition, fatty acid levels, amino acid composition, amino acid levels, biopolymers, pharmaceuticals, starch composition, starch levels, fermentable starch, fermentation yield, fermentation efficiency, energy yield, secondary compounds, metabolites, morphological characteristics, and agronomic characteristics.

[0041] As used herein, “genetic marker” means polymorphic nucleic acid sequence or nucleic acid feature. A “polymorphism” is a variation among individuals in sequence, particularly in DNA sequence, or feature, such as a transcriptional profile or methylation pattern. Useful polymorphisms include single nucleotide polymorphisms (SNPs), insertions or deletions in DNA sequence (Indels), simple sequence repeats of DNA sequence (SSRs) a restriction fragment length polymorphism, a haplotype, and a tag SNP. A genetic marker, a gene, a DNA-derived sequence, a RNA-derived sequence, a promoter, a 5′ untranslated region of a gene, a 3′ untranslated region of a gene, micro RNA, siRNA, a QTL, a satellite marker, a transgene, mRNA, ds mRNA, a transcriptional profile, and a methylation pattern may comprise polymorphisms.

[0042] As used herein, “marker assay” means a method for detecting a polymorphism at a particular locus using a particular method, e.g. measurement of at least one phenotype (such as seed color, flower color, or other visually detectable trait), restriction fragment length polymorphism (RFLP), single base extension, electrophoresis, sequence alignment, allelic specific oligonucleotide hybridization (ASO), random amplified polymorphic DNA (RAPD), micro array-based technologies, and nucleic acid sequencing technologies, etc.

[0043] As used herein, Mon-DKD2 and Mon-IDR1 are Monsanto commercially released corn inbreds that are non-haploid inducing.

[0044] As used herein, KHI1 is a corn maternal haploid inducer line derived from a genetic stock Stock6 (See U.S. Patent Application Publication No. 2004/0210959, the entire contents and disclosures of which are incorporated herein by reference). In addition to a high rate of maternal haploid induction, KHI1 also conditions strong anthocyanin pigmentation in the aleurone tissue in the crown region of the kernel and in the embryo. This visible marker can be used to identify the maternal haploids. The maternal haploid kernels possess colored crowns due to normal fertilization and development of the endosperm, but colorless embryos, if the female parent is non-pigmented (Birchler, 1994. In: Maize Handbook, Freeling & Walbot (eds) pp. 386-388; Chang, 1992. Maize Genetics Newsletter, 66:163-164).

[0045] As used herein, the term “crossed” or “cross” means the fusion of gametes via pollination to produce progeny (e.g., cells, seeds or plants). The term encompasses both sexual crosses (the pollination of one plant by another) and selfing (self-pollination, e.g., when the pollen and ovule are from the same plant).

[0046] As used herein, a “genetic map” is a description of genetic linkage relationships among loci on one or more chromosomes (or linkage groups) within a given species, generally depicted in a diagrammatic or tabular form. “Genetic mapping” is the process of defining the linkage relationships of loci through the use of genetic markers, populations segregating for the markers, and standard genetic principles of recombination frequency. A “genetic map location” is a location on a genetic map relative to surrounding genetic markers on the same linkage group where a specified marker can be found within a given species. If two different markers have the same genetic map location, the two markers are in such close proximity to each other that recombination occurs between them with such low frequency that it is undetectable.

[0047] As used herein, a “phenotypic marker” refers to a marker that can be used to discriminate phenotypes displayed by organisms.

[0048] As used herein, the term “transgene” means nucleic acid molecules in form of DNA, such as cDNA or genomic DNA, and RNA, such as mRNA or micro RNA, which may be single or double stranded.

[0049] The term “suppression” as used herein refers to a lower expression level of a target polynucleotide or target protein in a plant, plant cell or plant tissue, as compared to the expression in a wild-type or control plant, cell or tissue, at any developmental or temporal stage for the gene. The term “target protein” as used in the context of suppression refers to a protein which is suppressed; similarly, “target mRNA” refers to a polynucleotide which can be suppressed or, once expressed, degraded so as to result in suppression of the target protein it encodes. The term “target gene” as used in the context of suppression refers to either “target protein” or “target mRNA”. In alternate non-limiting embodiments, suppression of the target protein or target polynucleotide can give rise to an enhanced trait or altered phenotype directly or indirectly. In one exemplary embodiment, the target protein is one which can indirectly increase or decrease the expression of one or more other proteins, the increased or decreased expression, respectively, of which is associated with an enhanced trait or an altered phenotype. In another exemplary embodiment, the target protein can bind to one or more other proteins associated with an altered phenotype or enhanced trait to enhance or inhibit their function and thereby affect the altered phenotype or enhanced trait indirectly.

[0050] Suppression can be applied using numerous approaches. Non-limiting examples include: suppressing an endogenous gene(s) or a subset of genes in a pathway, suppressing one or more mutation that has resulted in decreased activity of a protein, suppressing the production of an inhibitory agent, to elevate, reduce or eliminate the level of substrate that an enzyme requires for activity, producing a new protein, activating a normally silent gene; or accumulating a product that does not normally increase under natural conditions.

[0051] The term “overexpression” as used herein refers to a greater expression level of a polynucleotide or a protein in a plant, plant cell or plant tissue, compared to expression in a wild-type plant, cell or tissue, at any developmental or temporal stage for the gene. Overexpression can take place in plant cells normally lacking expression of polypeptides functionally equivalent or identical to the present polypeptides. Overexpression can also occur in plant cells where endogenous expression of the present polypeptides or functionally equivalent molecules normally occurs, but such normal expression is at a lower level. Overexpression thus results in a greater than normal production, or “overproduction” of the polypeptide in the plant, cell or tissue.

[0052] Overexpression can be achieved using numerous approaches. In one embodiment, overexpression can be achieved by placing the DNA sequence encoding one or more polynucleotides or polypeptides under the control of a promoter, examples of which include but are not limited to endogenous promoters, heterologous promoters, inducible promoters and tissue specific promoters. In one exemplary embodiment, the promoter is a constitutive promoter, for example, the cauliflower mosaic virus 35S transcription initiation region. Thus, depending on the promoter used, overexpression can occur throughout a plant, in specific tissues of the plant, or in the presence or absence of different inducing or inducible agents, such as hormones or environmental signals.

[0053] The term “target protein” as used herein in the context of overexpression refers to a protein which is overexpressed; “target mRNA” refers to an mRNA which encodes and is translated to produce the target protein, which can also be overexpressed. The term “target gene” as used in the context of overexpression refers to either “target protein” or “target mRNA”. In alternative embodiments, the target protein can affect an enhanced trait or altered phenotype directly or indirectly. In the latter case it may do so, for example, by affecting the expression, function or substrate available to one or more other proteins. In an exemplary embodiment, the target protein can bind to one or more other proteins associated with an altered phenotype or enhanced trait to enhance or inhibit their function.

[0054] Gene Suppression Elements: The gene suppression element can be transcribable DNA of any suitable length, and generally includes at least about 19 to about 27 nucleotides (for example 19, 20, 21, 22, 23, or 24 nucleotides) for every target gene that the recombinant DNA construct is intended to suppress. In many embodiments the gene suppression element includes more than 23 nucleotides (for example, more than about 30, about 50, about 100, about 200, about 300, about 500, about 1000, about 1500, about 2000, about 3000, about 4000, or about 5000 nucleotides) for every target gene that the recombinant DNA construct is intended to suppress.

[0055] Suitable gene suppression elements useful in the recombinant DNA constructs of the invention include at least one element (and, in some embodiments, multiple elements) selected from the group consisting of: (a) DNA that includes at least one anti-sense DNA segment that is anti-sense to at least one segment of the at least one first target gene; (b) DNA that includes multiple copies of at least one anti-sense DNA segment that is anti-sense to at least one segment of the at least one first target gene; (c) DNA that includes at least one sense DNA segment that is at least one segment of the at least one first target gene; (d) DNA that includes multiple copies of at least one sense DNA segment that is at least one segment of the at least one first target gene; (e) DNA that transcribes to RNA for suppressing the at least one first target gene by forming double-stranded RNA and includes at least one anti-sense DNA segment that is anti-sense to at least one segment of the at least one target gene and at least one sense DNA segment that is at least one segment of the at least one first target gene; (f) DNA that transcribes to RNA for suppressing the at least one first target gene by forming a single double-stranded RNA and includes multiple serial anti-sense DNA segments that are anti-sense to at least one segment of the at least one first target gene and multiple serial sense DNA segments that are at least one segment of the at least one first target gene; (g) DNA that transcribes to RNA for suppressing the at least one first target gene by forming multiple double strands of RNA and includes multiple anti-sense DNA segments that are anti-sense to at least one segment of the at least one first target gene and multiple sense DNA segments that are at least one segment of the at least one first target gene, and wherein said multiple anti-sense DNA segments and the multiple sense DNA segments are arranged in a series of inverted repeats; (h) DNA that includes nucleotides derived from a miRNA, preferably a plant miRNA; (i) DNA that includes nucleotides of a siRNA; (j) DNA that transcribes to an RNA aptamer capable of binding to a ligand; and (k) DNA that transcribes to an RNA aptamer capable of binding to a ligand, and DNA that transcribes to regulatory RNA capable of regulating expression of the first target gene, wherein the regulation is dependent on the conformation of the regulatory RNA, and the conformation of the regulatory RNA is allosterically affected by the binding state of the RNA aptamer.

[0056] As used herein a “plant” includes a whole plant, a transgenic plant, meristematic tissue, a shoot organ/structure (for example, leaf, stem and tuber), a root, a flower, a floral organ/structure (for example, a bract, a sepal, a petal, a stamen, a carpel, an anther and an ovule), a seed (including an embryo, endosperm, and a seed coat) and a fruit (the mature ovary), plant tissue (for example, vascular tissue, ground tissue, and the like) and a cell (for example, guard cell, egg cell, pollen, mesophyll cell, and the like), and progeny of same. The classes of plants that can be used in the disclosed methods are generally as broad as the classes of higher and lower plants amenable to transformation and breeding techniques, including angiosperms (monocotyledonous and dicotyledonous plants), gymnosperms, ferns, horsetails, psilophytes, lycophytes, bryophytes, and multicellular algae.

[0057] As used herein a “transgenic plant cell” means a plant cell that is transformed with stably-integrated, recombinant DNA, for example, by Agrobacterium-mediated transformation or by bombardment using microparticles coated with recombinant DNA or by other means. A plant cell of this disclosure can be an originally-transformed plant cell that exists as a microorganism or as a progeny plant cell that is regenerated into differentiated tissue, for example, into a transgenic plant with stably-integrated, recombinant DNA, or seed or pollen derived from a progeny transgenic plant.

[0058] As used herein a “recombinant polynucleotide” or “recombinant DNA” is a polynucleotide that is not in its native state, for example, a polynucleotide comprises a series of nucleotides (represented as a nucleotide sequence) not found in nature, or a polynucleotide is in a context other than that in which it is naturally found; for example, separated from polynucleotides with which it typically is in proximity in nature, or adjacent (or contiguous with) polynucleotides with which it typically is not in proximity The “recombinant polynucleotide” or “recombinant DNA” refers to polynucleotide or DNA which has been genetically engineered and constructed outside of a cell including DNA containing naturally occurring DNA or cDNA or synthetic DNA. For example, the polynucleotide at issue can be cloned into a vector, or otherwise recombined with one or more additional nucleic acids.

[0059] As used herein, a “functional fragment” refers to a portion of a polypeptide provided herein which retains full or partial molecular, physiological or biochemical function of the full length polypeptide. In the present invention, transformation constructs can be made to contain portions of the causal genetic elements associated with haploid induction. Each of these constructs may be transformed into a non-haploid induction line and the resulting transgenic plants are evaluated for haploid induction. By testing several such constructs that contain different fragments of the causal genetic elements, the portion required for haploid induction can determined.

[0060] A “recombinant DNA construct” as used in the present disclosure comprises at least one expression cassette having a promoter operable in plant cells and a polynucleotide of the present disclosure. DNA constructs can be used as a means of delivering recombinant DNA constructs to a plant cell in order to effect stable integration of the recombinant molecule into the plant cell genome. In one embodiment, the polynucleotide can encode a protein or variant of a protein or fragment of a protein that is functionally defined to maintain activity in transgenic host cells including plant cells, plant parts, explants and whole plants. In another embodiment, the polynucleotide can encode a non-coding RNA that interferes with the functioning of endogenous classes of small RNAs that regulate expression, including but not limited to taRNAs, siRNAs and miRNAs. Recombinant DNA constructs are assembled using methods known to persons of ordinary skill in the art and typically comprise a promoter operably linked to DNA, the expression of which provides the enhanced agronomic trait.

[0061] Percent identity describes the extent to which polynucleotides or protein segments are invariant in an alignment of sequences, for example nucleotide sequences or amino acid sequences. An alignment of sequences is created by manually aligning two sequences, for example, a stated sequence, as provided herein, as a reference, and another sequence, to produce the highest number of matching elements, for example, individual nucleotides or amino acids, while allowing for the introduction of gaps into either sequence. An “identity fraction” for a sequence aligned with a reference sequence is the number of matching elements, divided by the full length of the reference sequence, not including gaps introduced by the alignment process into the reference sequence. “Percent identity” (“% identity”) as used herein is the identity fraction times 100.

[0062] As used herein, a “homolog” or “homologues” means a protein in a group of proteins that perform the same biological function, for example, proteins that belong to the same Pfam protein family and that provide a common enhanced trait in transgenic plants of this disclosure. Homologs are expressed by homologous genes. With reference to homologous genes, homologs include orthologs, for example, genes expressed in different species that evolved from common ancestral genes by speciation and encode proteins retain the same function, but do not include paralogs, i.e., genes that are related by duplication but have evolved to encode proteins with different functions. Homologous genes include naturally occurring alleles and artificially-created variants.

[0063] As used herein, the term “promoter” refers generally to a DNA molecule that is involved in recognition and binding of RNA polymerase II and other proteins (trans-acting transcription factors) to initiate transcription. A promoter can be initially isolated from the 5′ untranslated region (5′ UTR) of a genomic copy of a gene. Alternately, promoters can be synthetically produced or manipulated DNA molecules. Promoters can also be chimeric, that is a promoter produced through the fusion of two or more heterologous DNA molecules. Plant promoters include promoter DNA obtained from plants, plant viruses, fungi and bacteria such as Agrobacterium and Bradyrhizobium bacteria.

[0064] Promoters which initiate transcription in all or most tissues of the plant are referred to as “constitutive” promoters. Promoters which initiate transcription during certain periods or stages of development are referred to as “developmental” promoters. Promoters whose expression is enhanced in certain tissues of the plant relative to other plant tissues are referred to as “tissue enhanced” or “tissue preferred” promoters. Promoters which express within a specific tissue of the plant, with little or no expression in other plant tissues are referred to as “tissue specific” promoters. A promoter that expresses in a certain cell type of the plant, for example a microspore mother cell, is referred to as a “cell type specific” promoter. An “inducible” promoter is a promoter in which transcription is initiated in response to an environmental stimulus such as cold, drought or light; or other stimuli such as wounding or chemical application. Many physiological and biochemical processes in plants exhibit endogenous rhythms with a period of about 24 hours. A “diurnal promoter” is a promoter which exhibits altered expression profiles under the control of a circadian oscillator. Diurnal regulation is subject to environmental inputs such as light and temperature and coordination by the circadian clock.

[0065] Sufficient expression in plant seed tissues is desired to affect improvements in seed composition. Exemplary promoters for use for seed composition modification include promoters from seed genes such as napin as disclosed in U.S. Pat. No. 5,420,034, maize L3 oleosin as disclosed in U.S. Pat. No. 6,433,252, zein Z27 as disclosed by Russell et al. (1997) Transgenic Res. 6(2):157-166, globulin 1 as disclosed by Belanger et al (1991) Genetics 129:863-872, glutelin 1 as disclosed by Russell (1997) supra, and peroxiredoxin antioxidant (Per1) as disclosed by Stacy et al. (1996) Plant Mol Biol. 31(6):1205-1216.

[0066] Expression cassettes of this disclosure can include a “transit peptide” or “targeting peptide” or “signal peptide” molecule located either 5′ or 3′ to or within the gene(s). These terms generally refer to peptide molecules that when linked to a protein of interest directs the protein to a particular tissue, cell, subcellular location, or cell organelle. Examples include, but are not limited to, chloroplast transit peptides (CTPs), chloroplast targeting peptides, mitochondrial targeting peptides, nuclear targeting signals, nuclear exporting signals, vacuolar targeting peptides, and vacuolar sorting peptides. For description of the use of chloroplast transit peptides see U.S. Pat. Nos. 5,188,642 and 5,728,925. For description of the transit peptide region of an Arabidopsis EPSPS gene in the present disclosure, see Klee, H. J. Et al (MGG (1987) 210:437-442. Expression cassettes of this disclosure can also include an intron or introns. Expression cassettes of this disclosure can contain a DNA near the 3′ end of the cassette that acts as a signal to terminate transcription from a heterologous nucleic acid and that directs polyadenylation of the resultant mRNA. These are commonly referred to as “3′-untranslated regions” or “3′-non-coding sequences” or “3′-UTRs”. The “3′ non-translated sequences” means DNA sequences located downstream of a structural nucleotide sequence and include sequences encoding polyadenylation and other regulatory signals capable of affecting mRNA processing or gene expression. The polyadenylation signal functions in plants to cause the addition of polyadenylate nucleotides to the 3′ end of the mRNA precursor. The polyadenylation signal can be derived from a natural gene, from a variety of plant genes, or from T-DNA. An example of a polyadenylation sequence is the nopaline synthase 3′ sequence (nos 3′; Fraley et al., Proc. Natl. Acad. Sci. USA 80: 4803-4807, 1983). The use of different 3′ non-translated sequences is exemplified by Ingelbrecht et al., Plant Cell 1:671-680, 1989.

[0067] Expression cassettes of this disclosure can also contain one or more genes that encode selectable markers and confer resistance to a selective agent such as an antibiotic or an herbicide. A number of selectable marker genes are known in the art and can be used in the present disclosure: selectable marker genes conferring tolerance to antibiotics like kanamycin and paromomycin (nptII), hygromycin B (aph IV), spectinomycin (aadA), U.S. Patent Publication 2009/0138985A1 and gentamycin (aac3 and aacC4) or tolerance to herbicides like glyphosate (for example, 5-enolpyruvylshikimate-3-phosphate synthase (EPSPS), U.S. Pat. Nos. 5,627,061; 5,633,435; 6,040,497; 5,094,945), sulfonyl herbicides (for example, acetohydroxyacid synthase or acetolactate synthase conferring tolerance to acetolactate synthase inhibitors such as sulfonylurea, imidazolinone, triazolopyrimidine, pyrimidyloxybenzoates and phthalide (U.S. Pat. Nos. 6,225,105; 5,767,366; 4,761,373; 5,633,437; 6,613,963; 5,013,659; 5,141,870; 5,378,824; 5,605,011)), bialaphos or phosphinothricin or derivatives (e. g., phosphinothricin acetyltransferase (bar) tolerance to phosphinothricin or glufosinate (U.S. Pat. Nos. 5,646,024; 5,561,236; 5,276,268; 5,637,489; 5,273,894); dicamba (dicamba monooxygenase, Patent Application Publications US2003/0115626A1), or sethoxydim (modified acetyl-coenzyme A carboxylase for conferring tolerance to cyclohexanedione), and aryloxyphenoxypropionate (haloxyfop, U.S. Pat. No. 6,414,222).

[0068] Transformation vectors of this disclosure can contain one or more “expression cassettes”, each comprising a native or non-native plant promoter operably linked to a polynucleotide sequence of interest, which is operably linked to a 3′ UTR sequence and termination signal, for expression in an appropriate host cell. It also typically comprises sequences required for proper translation of the polynucleotide or transgene. As used herein, the term “transgene” refers to a polynucleotide molecule artificially incorporated into a host cell's genome. Such a transgene can be heterologous to the host cell. The term “transgenic plant” refers to a plant comprising such a transgene. The coding region usually codes for a protein of interest but can also code for a functional RNA of interest, for example an antisense RNA, a nontranslated RNA, in the sense or antisense direction, a miRNA, a noncoding RNA, or a synthetic RNA used in either suppression or over expression of target gene sequences. The expression cassette comprising the nucleotide sequence of interest can be chimeric, meaning that at least one of its components is heterologous with respect to at least one of its other components. As used herein the term “chimeric” refers to a DNA molecule that is created from two or more genetically diverse sources, for example a first molecule from one gene or organism and a second molecule from another gene or organism.

[0069] Recombinant DNA constructs in this disclosure generally include a 3′ element that typically contains a polyadenylation signal and site. Known 3′ elements include those from Agrobacterium tumefaciens genes such as nos 3′, tml 3′, tmr 3′, tms 3′, ocs 3′, tr7 3′, for example disclosed in U.S. Pat. No. 6,090,627; 3′ elements from plant genes such as wheat (Triticum aesevitum) heat shock protein 17 (Hsp17 3′), a wheat ubiquitin gene, a wheat fructose-1,6-biphosphatase gene, a rice glutelin gene, a rice lactate dehydrogenase gene and a rice beta-tubulin gene, all of which are disclosed in U.S. Patent Application Publication 2002/0192813 A1; and the pea (Pisum sativum) ribulose biphosphate carboxylase gene (rbs 3′), and 3′ elements from the genes within the host plant.

[0070] As used herein “operably linked” means the association of two or more DNA fragments in a recombinant DNA construct so that the function of one, for example, protein-encoding DNA, is controlled by the other, for example, a promoter.

[0071] Transgenic plants can comprise a stack of one or more polynucleotides disclosed herein resulting in the production of multiple polypeptide sequences. Transgenic plants comprising stacks of polynucleotides can be obtained by either or both of traditional breeding methods or through genetic engineering methods. These methods include, but are not limited to, crossing individual transgenic lines each comprising a polynucleotide of interest, transforming a transgenic plant comprising a first gene disclosed herein with a second gene, and co-transformation of genes into a single plant cell. Co-transformation of genes can be carried out using single transformation vectors comprising multiple genes or genes carried separately on multiple vectors.

[0072] Transgenic plants comprising or derived from plant cells of this disclosure transformed with recombinant DNA can be further enhanced with stacked traits, for example, a crop plant having an enhanced trait resulting from expression of DNA disclosed herein in combination with herbicide and/or pest resistance traits. For example, genes of the current disclosure can be stacked with other traits of agronomic interest, such as a trait providing herbicide resistance, or insect resistance, such as using a gene from Bacillus thuringensis to provide resistance against lepidopteran, coliopteran, homopteran, hemiopteran, and other insects, or improved quality traits such as improved nutritional value. Herbicides for which transgenic plant tolerance has been demonstrated and the method of the present disclosure can be applied include, but are not limited to, glyphosate, dicamba, glufosinate, sulfonylurea, bromoxynil, norflurazon, 2,4-D (2,4-dichlorophenoxy)acetic acid, aryloxyphenoxy propionates, p-hydroxyphenyl pyruvate dioxygenase inhibitors (HPPD), and protoporphyrinogen oxidase inhibitors (PPO) herbicides. Polynucleotide molecules encoding proteins involved in herbicide tolerance known in the art and include, but are not limited to, a polynucleotide molecule encoding 5-enolpyruvylshikimate-3-phosphate synthase (EPSPS) disclosed in U.S. Pat. Nos. 5,094,945; 5,627,061; 5,633,435 and 6,040,497 for imparting glyphosate tolerance; polynucleotide molecules encoding a glyphosate oxidoreductase (GOX) disclosed in U.S. Pat. No. 5,463,175 and a glyphosate-N-acetyl transferase (GAT) disclosed in U.S. Patent No. Application Publication 2003/0083480 A1 also for imparting glyphosate tolerance; dicamba monooxygenase disclosed in U.S. Patent Application Publication 2003/0135879 A1 for imparting dicamba tolerance; a polynucleotide molecule encoding bromoxynil nitrilase (Bxn) disclosed in U.S. Pat. No. 4,810,648 for imparting bromoxynil tolerance; a polynucleotide molecule encoding phytoene desaturase (crtI) described in Misawa et al, (1993) Plant J. 4:833-840 and in Misawa et al, (1994) Plant J. 6:481-489 for norflurazon tolerance; a polynucleotide molecule encoding acetohydroxyacid synthase (AHAS, aka ALS) described in Sathasiivan et al. (1990) Nucl. Acids Res. 18:2188-2193 for imparting tolerance to sulfonylurea herbicides; polynucleotide molecules known as bar genes disclosed in DeBlock, et al. (1987) EMBO J. 6:2513-2519 for imparting glufosinate and bialaphos tolerance; polynucleotide molecules disclosed in U.S. Patent Application Publication 2003/010609 A1 for imparting N-amino methyl phosphonic acid tolerance; polynucleotide molecules disclosed in U.S. Pat. No. 6,107,549 for imparting pyridine herbicide resistance; molecules and methods for imparting tolerance to multiple herbicides such as glyphosate, atrazine, ALS inhibitors, isoxoflutole and glufosinate herbicides are disclosed in U.S. Pat. No. 6,376,754 and U.S. Patent Application Publication 2002/0112260. Molecules and methods for imparting insect/nematode/virus resistance are disclosed in U.S. Pat. Nos. 5,250,515; 5,880,275; 6,506,599; 5,986,175 and U.S. Patent Application Publication 2003/0150017 A1.

[0073] As an alternative to traditional transformation methods, a DNA sequence, such as a transgene, expression cassette(s), etc., may be inserted or integrated into a specific site or locus within the genome of a plant or plant cell via site-directed integration. Recombinant DNA construct(s) and molecule(s) of this disclosure may thus include a donor template sequence comprising at least one transgene, expression cassette, or other DNA sequence for insertion into the genome of the plant or plant cell. Such donor template for site-directed integration may further include one or two homology arms flanking the sequence, transgene, cassette, etc., to be inserted into the plant genome. The recombinant DNA construct(s) of this disclosure may further comprise an expression cassette(s) encoding a site-specific nuclease and/or any associated protein(s) to carry out site-directed integration. These nuclease expressing cassette(s) may be present in the same molecule or vector as the donor template (in cis) or on a separate molecule or vector (in trans). Several methods for site-directed integration are known in the art involving different proteins (or complexes of proteins and/or guide RNA) that cut the genomic DNA to produce a double strand break (DSB) or nick at a desired genomic site or locus. Briefly as understood in the art, during the process of repairing the DSB or nick introduce by the nuclease enzyme, the donor template DNA may become integrated into the genome at the site of the DSB or nick. The presence of the homology arm(s) in the donor template may promote the adoption and targeting of the insertion sequence into the plant genome during the repair process through homologous recombination, although an insertion event may occur through non-homologous end joining (NHEJ). Examples of site-specific nucleases that may be used include zinc-finger nucleases, engineered or native meganucleases, TALE-endonucleases, and RNA-guided endonucleases (e.g., Cas9 or Cpf1). For methods using RNA-guided site-specific nucleases (e.g., Cas9 or Cpf1), the recombinant DNA construct(s) will also comprise a sequence encoding one or more guide RNAs to direct the nuclease to the desired site within the plant genome.

[0074] As used herein, the term “homology arm” refers to a polynucleotide sequence that has at least 80%, at least 85%, at least 90%, at least 91%, at least 92%, at least 93%, at least 94%, at least 95%, at least 96%, at least 97%, at least 98%, at least 99% or 100% sequence identity to a target sequence in a plant or plant cell that is being transformed. A homology arm can comprise at least 15, at least 20, at least 25, at least 30, at least 40, at least 50, at least 100, at least 250, at least 500, or at least 1000 nucleotides.

[0075] In the present invention, genomic region corresponding to the haploid induction region MonI1 in non-haploid inducer lines can be edited to create haploid inducer lines. Custom nucleases may be designed to cut sequences flanking the region from a non-haploid induction line that corresponds to the haploid induction region. The nucleases may be TALENs, ZFNs, CRISPR/Cas9, meganucleases, or other custom nucleases. As an alternative to custom nucleases, custom recombinases may be designed to target sequences flanking the region from a non-haploid inducer line that corresponds to the haploid induction region. A WT line such as corn Mon-DKD2 is transformed with constructs expressing the nucleases or recombinases and events screened to identify cases where the region was removed.

[0076] Progeny of those cases may be screened for homozygous deletions and then crossed to a tester with polymorphic genetic markers. The progeny are harvested and scored for haploids.

[0077] To determine which region, when lost, is responsible for haploid induction, additional nucleases or recombinases may be designed and used to delete portions of the region corresponding to haploid induction locus. Events may be produced using these reagents and screened to find the intended deletions. Progeny may be screened for homozygous deletions and then crossed to a tester with polymorphic genetic markers. The progeny are harvested and scored for haploids.

[0078] As used herein, the term “supernumerary chromosome” refers to an extra chromosome found in addition to the normal complement of A chromosomes. In one aspect, a HI inducer line provided herein comprises at least 1, 2, 3, 4, 5, 6, 7, 8, 9, or at least 10 supernumerary chromosomes. In another aspect, a HI non-inducer line provided herein comprises at least 1, 2, 3, 4, 5, 6, 7, 8, 9, or at least 10 supernumerary chromosomes. In one aspect, a supernumerary chromosome provided herein is a B chromosome. In another aspect, a supernumerary chromosome provided herein is an artificially derived chromosome. In yet another aspect, an artificially derived chromosome provided herein is a truncated chromosome or a de novo generated chromosome.

[0079] In an aspect, a B chromosome provided herein is a maize B chromosome. In another aspect, a B chromosome provided herein is a rye B chromosome. In an aspect, a B chromosome provided herein is a Tripsacum B chromosome. B chromosomes are found in addition to the normal diploid complement of chromosomes in a cell. For example, in maize, the normal diploid complement of chromosomes is 20. B chromosomes are dispensable and are not required for normal plant development. When two B chromosomes are present in a single plant, the two B chromosomes can pair with each other at meiotic prophase and recombination can occur. B chromosomes do not pair with or recombine with A chromosomes.

[0080] In one aspect, a method provided herein comprises the incorporation of a DNA of interest into a supernumerary chromosome. In another aspect, a method provided herein comprises the modification at least one locus on a supernumerary chromosome. In another aspect, a method provided herein comprises the translocation of a nucleic acid molecule from a supernumerary chromosome to an A chromosome, a plastid genome, or a mitochondrial genome.

[0081] One or more B chromosomes, according to certain aspects of the present disclosure, can be delivered to a progeny plant without the rest of the paternal or maternal genome (e.g., via a haploid induction cross that retains the B chromosome), allowing complete conversion to a new variety in a single cross. In another aspect, a B chromosome may be transferred from a first plant species to a second plant species, allowing testing of the transgene or transgenes in other crops. For example, transmission of a B chromosome to oat has been demonstrated, as well as transmission of a corn chromosome to wheat (Koo et al., Genome Research 21(6):908-914, 2011; Comeau et al., Plant Science 81(1):117-125, 1992).

[0082] In certain cases, such as in corn and rye, B chromosomes have “accumulation mechanisms” that allow them to transmit at greater than Mendelian frequencies. For example, in corn, the sister chromatids of the B chromosome fail to separate during the second pollen (first generative) division. As a result, both sister chromatids are delivered to one of the sperm, while the other receives neither. This effect, called non-disjunction, means that a plant with only a single B chromosome can deliver zero, one, or two B chromosomes to the next generation when used as a male. Such an effect may be desirable during the trait introgression process, since it allows individuals that are homozygous (as opposed to hemizygous) for a megalocus carried on a B chromosome to be recovered in a backcross, as long as the B chromosome is delivered from the pollen.

[0083] In another aspect, B chromosomes may be used to rapidly transfer the haploid induction effect to new lines. Because the B chromosome can be retained at a low percentage, a line where the haploid induction effect is caused by the B chromosome may allow the effect to be moved to additional lines by a single cross. This simplifies creation of new haploid induction lines with desired agronomic or genetic properties. Genetic elements disclosed in this application can be incorporated into a B chromosome to produce plants containing the haploid inducing B chromosome (HI-B chromosome). Other haploid induction genes, e.g. the CENH3-based transgenes (Kelliher, T et al., “Maternal Haploids Are Preferentially Induced by CENH3-tailswap Transgenic Complementation in Maize”, Frontiers in Plant Science 7: 414 (2016)) can also be incorporated into a B chromosome to produce plants containing HI-B chromosome. To move the haploid induction effect to new lines, a line containing HI-B chromosome is crossed to the desired line and progeny are screened for cases that are haploid and that have retained the HI-B chromosome.

[0084] In another embodiment, a non-inducer line can be converted to a haploid inducer line by either deleting the region corresponding to MonI1 in the non-inducer line, or swap the entire or portions of such region with the haploid induction region in KHI1.

### EXAMPLES

### Example 1. Identification of the Fine Mapped Haploid Induction Region (MonI1) and the Associated Causal Genetic Elements

[0085] In this example, the haploid induction QTL (qhir1) was fine mapped using backcross progenies of corn non-inducer line Mon-IDR1 and inducer line KHI1, and the Genotyping by Sequencing (GBS) was used for high density mapping. 276 GBS markers from 8 MB region in 100-105 cM of the haploid induction QTL in Chromosome 1 were used in the fine mapping process. The haploid induction locus was narrowed down to a 238 kb MonI1 region (SEQ ID NO: 6) flanked by markers MonI1-m1 (SEQ ID NO: 7) and MonI1-m2 (SEQ ID NO: 8) based on the B73 reference genome. The SNP positions and genotypes of both markers are listed in Table 1.

TABLE 1
Genetic markers associated with haploid
induction for the MonI1 region.

| Marker | Map Position | SEQ ID | SNP | Allelic Homozygous |
|---|---|---|---|---|
| Name | in B73 (cM) | NO: | Position | forms (KHI1/Mon-IDR1) |
| MonI1-m1 | 104.67 | 44 | 101 | GG/TT |
| MonI1-m2 | 104.8 | 45 | 101 | GG/AA |

[0086] BAC library was also created for the haploid inducer line KHI1 and screened using similar set of GBS markers used in the fine mapping process. Eleven overlapping BACs spanning the extended region of the MonI1 were identified and sequenced using PacBio and Illumina. Assembly of the eleven BACs formed an about 400 kb contiguous sequence (SEQ ID NO: 1). Three KHI1 BAC sequences (SEQ ID NOs: 2, 3 and 4) were identified that spanned the MonI1 region and the contiguous sequence (SEQ ID NO: 5) flanked by the MonI1 markers was extracted from the assembly (SEQ ID NO: 1) to represent the MonI1 region in KHI1.

[0087] Sequence analysis of the KHI1 assembly (SEQ ID NO: 1) identified a number of DNA coding sequences (SEQ ID NOs: 9-30) and among them, 5 coding DNA sequences (SEQ ID NOs 20-24) were identified within the KHI1 MonI1 region (SEQ ID NO: 5). For example, SEQ ID NO: 20 is a coding DNA sequence encoding a patatin-like phospholipase (PNPLA, SEQ ID NO: 42). The PNPLA gene was identified in the MonI1 region in both B73 (PNPLA, SEQ ID NO: 91) and KHI1. The Homologous PNPLA genes were also identified in rice (SEQ ID NO: 107) and sorghum (SEQ ID NO: 109). More PNPLA homologs from other species such as wheat and brachypodium are also known in the public databases. 7 genes in B73 MonI1 region (SEQ ID NOs: 93 and 99) were identified to be absent in the KHI1 MonI1 region. Sequence analysis of the MonI1 region in corn Mon-DKD2 showed high homology to B73. For examples, the Mon-DKD2 genes (SEQ ID NOs: 87 and 88) are homologous to the B73 genes (SEQ ID NO: 94 and 95), respectively. A number of the ncRNAs (SEQ ID NOs: 53-85) were predicted within the assembly (SEQ ID NO: 1) in KHI1 and among these ncRNAs, SEQ ID NOs: 72-82 were identified within the MonI1 region (SEQ ID NO: 5) in KHI1.

[0088] The KHI1 MonI1 sequences and the shared, deleted or unique genetic elements identified above are candidates for producing transgenic haploid inducer plants.

### Example 2. Validation of Haploid Induction Phenotype in Corn Caused by the KHI1 MonI1 Sequence

[0089] One of the KHI1 MonI1 sequences represented by SEQ ID NOs: 1-5 and their complements or fragments is transformed into corn by Agrobacterium-Mediated transformation of dry excised embryo's from a non-haploid inducing maize line and selected using glyphosate. The resulting R0 transgenic plants are assayed with molecular markers from the haploid induction line that are present in the BAC but not present in the non-haploid inducing maize line. The markers are distributed throughout the BAC and several events are identified that contained all the markers showing that the entire BAC was present.

[0090] The R0 plants from these events and events that lacked some or all of the markers from the KHI1 BAC are self pollinated and seeds are harvested. These seeds are planted and seedlings are genotyped to identify individuals that are homozygous for the transgenic insertion. These individuals are grown and used as pollen sources to cross onto wild-type plants of a different variety (genetic markers are available to distinguish genotypes of the two parent lines). As a further precaution to ensure that self-pollination of the WT parent does not occur, tassels from all WT parents are removed before maturity.

[0091] Next, seeds are harvested from these crosses and germinated. The seedlings are screened by genotyping to identify cases that lack the transgene or genetic markers from the non-haploid inducing maize line. These cases represent putative haploids.

### Example 3. Use of the KHI1 MonI1 Sequence to Create Haploid Inducer Lines in Corn Relatives

[0092] The construct containing KHI1 MonI1 sequences identified in Example 1 is transformed into sorghum. The resulting transgenic events are screened by molecular methods to confirm construct intactness. R0 individuals are self pollinated and R1 progeny are screened for homozygous individuals. These individuals are crossed to WT sorghum of a different variety. The progeny of this haploid induction test cross are assayed with genetic markers that detect the transgene and/or the transformation line. Cases where no markers from the transgenic parent are detected are candidate haploids.

### Example 4. Over-Expression of MonI1 Candidate Gene to Produce Haploid Induction Lines

[0093] A construct comprising the polynucleotide sequence selected from the group consisting of SEQ ID NOs: 20-24, and 86 is created. This construct is transformed into a WT non-inducer line (Mon-DKD2) using agrobacteria and events are selected that had an intact single copy T-DNA. The events are self-pollinated to produce R1 seed.

[0094] R1 plants are germinated and sampled. Individuals that are homozygous (2 copy) for the events are selected and grown. These plants are crossed to a different non-haploid induction line and progeny are evaluated with markers to select haploid lines as described in Example 2.

### Example 5. Over-Expression of MonI1 Candidate Gene Stack to Produce Haploid Inducer Lines

[0095] A construct comprising a first polynucleotide sequence and a second polynucleotide sequence selected from the group consisting of SEQ ID NOs: 20-24 is created. This construct is transformed into a WT non-inducer line (Mon-DKD2) using agrobacteria and events are selected that have an intact single copy T-DNA. The events are self-pollinated to produce R1 seed.

[0096] R1 plants are germinated and sampled. Individuals that are homozygous (2 copy) for the events are selected and grown. These plants are crossed to a different non-haploid induction line and progeny are evaluated with markers to select haploid lines as described in Example 2.

### Example 6. Over-Expression of Individual Candidate Gene or Gene Stack to Cause Haploid Induction in Sorghum

[0097] The constructs described in Example 4 or 5 are transformed into sorghum. The resulting transgenic events are screened by molecular methods to confirm construct intactness. R0 individuals are self pollinated and R1 progeny are screened for homozygous individuals. These individuals are crossed to WT sorghum of a different variety. The progeny of this haploid induction test cross are assayed with genetic markers that detect the transgene and/or the transformation line. Cases where no markers from the transgenic parent are detected are candidate haploids.

### Example 7. Suppression of Candidate Target Genes to Cause Haploid Induction

[0098] A construct was made to express an artificial miRNA (SEQ ID NO: 111) to suppress expression of the target gene (SEQ ID NO: 87) identified in Mon-DKD2 in Example 1. This construct was transformed into a non-inducer line using agrobacteria and events were selected that had an intact single copy T-DNA. The events were self-pollinated and seed harvested.

[0099] R1 plants from several events were germinated and sampled. Individuals that were homozygous (2 copy) for the events were selected and are grown. These plants are crossed to a different inbred line and progeny evaluated to determine if any are haploid as described in Example 2.

[0100] Another construct was also made to express an artificial miRNA (SEQ ID NO: 112) to suppress expression of the target gene (SEQ ID NO: 88). This construct is tested and determined for haploid induction effect as described above.

[0101] A construct is made to express a suppression element to suppress expression of an endogenous target gene that is present in the MonI1 region in the target species but absent in the KHI MonI region. This construct is tested and determined for haploid induction effect as described above.

### Example 8. Expression of Non-Coding RNAs to Cause Haploid Induction

[0102] Constructs are made that have expression cassettes for one or more of the ncRNAs (SEQ ID NOs: 72-82) present in the KHI MonI1 region. Events are made and tested for haploid induction as described in previous examples.

1. A recombinant DNA construct comprising a promoter functional in a plant cell and operably linked to:
a) a polynucleotide that comprises a nucleotide sequence with at least 90%, at least 91%, at least 92%, at least 93%, at least 94%, at least 95%, at least 96%, at least 97%, at least 98%, at least 99% identity, or 100% identity to a sequence selected from the group consisting of SEQ ID NOs: 1-5, and their complements, or a functional fragment thereof;
b) a polynucleotide that comprises a nucleotide sequence with at least 90%, at least 91%, at least 92%, at least 93%, at least 94%, at least 95%, at least 96%, at least 97%, at least 98%, at least 99% identity, or 100% identity to a sequence selected from the group consisting of SEQ ID NOs: 20-24, 86, 107 and 109;
c) a polynucleotide that encodes a polypeptide having an amino acid sequence with at least 90%, at least 91%, at least 92%, at least 93%, at least 94%, at least 95%, at least 96%, at least 97%, at least 98%, at least 99% identity, or 100% identity to a sequence selected from the group consisting of SEQ ID NOs: 42-46, 108 and 110; or
d) a polynucleotide that comprises a nucleotide sequence suppressing at least one endogenous target gene having an amino acid sequence with at least 90%, at least 91%, at least 92%, at least 93%, at least 94%, at least 95%, at least 96%, at least 97%, at least 98%, at least 99% identity, or 100% identity to a sequence selected from the group consisting of SEQ ID NOs: 89, 90, 92 and 100-106.

2. The recombinant DNA construct of claim 1, wherein said nucleotide sequence suppressing at least one endogenous target gene is selected from the group consisting of SEQ ID NOs: 111 and 112.

3. A DNA molecule or vector comprising the recombinant DNA construct of claim 1.

4. A transgenic plant comprising the recombinant DNA construct of claim 1.

5. The transgenic plant of claim 4, wherein said plant is a progeny, a propagule, or a field crop.

6. The transgenic plant of claim 4, wherein said plant is a propagule selected from the group consisting of cell, pollen, ovule, flower, embryo, leaf, root, stem, shoot, meristem, grain and seed.

7. The transgenic plant of claim 4, wherein said plant is a field crop selected from the group consisting of corn, soybean, sorghum, cotton, canola, rice, barley, oat, wheat, turf grass, alfalfa, sugar beet, sunflower, quinoa and sugar cane.

8. (canceled)

9. (canceled)

10. (canceled)

11. (canceled)

12. (canceled)

13. A method for obtaining a haploid inducer plant comprising the steps of:
a) transforming at least one cell of an explant with a recombinant DNA construct of claim 1;
b) regenerating or developing the transgenic plant from the transformed explants; and
c) selecting a plant that exhibits haploid induction phenotype when crossed to a non-inducer line.

14. The method of claim 8, wherein the transforming step (a) is carried out via Agrobacterium-mediated transformation or microprojectile bombardment of the explant.

15. The method of claim 8, wherein the transforming step (a) comprises site-directed integration of the recombinant DNA construct.

16. A method for obtaining a haploid inducer plant comprising the steps of:
a) identifying an endogenous genomic locus corresponding to a gene selected from the group consisting of SEQ ID NOs: 42-46, 89-90, 92, 100-106, 108 and 110, or its homologs; and
b) site-specifically inserting a recombinant sequence capable of modulating expression of said gene by transforming the plant with a recombinant DNA construct

17. The method of claim 11, wherein said recombinant DNA construct comprises a donor template, wherein said donor template comprises at least one homology arm flanking a recombinant sequence for modulation of expression of an endogenous gene.

18. The method of claim 11, wherein said recombinant DNA construct further comprises at least one cassette encoding site-specific nuclease, wherein said site specific nuclease is selected from the group comprising zinc-finger nuclease, an engineered or native meganuclease, a TALE-endonuclease, or an RNA-guided endonuclease.

19. The method of claim 13, wherein said DNA construct further comprises at least one cassette encoding one or more guide RNAs.

20. The method of claim 11, further comprising:
c) selecting a plant that exhibits haploid induction phenotype when crossed to a non-inducer plant.

21. (canceled)

22. (canceled)

23. (canceled)

24. A method for transferring haploid induction effect to new lines comprising the steps of:
a) providing a first plant comprising at least one supernumerary chromosome, wherein the at least one supernumerary chromosome comprises at least one genetic element that can cause haploid induction;
b) crossing the first plant with a second plant of interest; and
c) recovering a third plant resultant from crossing the first plant and second plant, wherein the third plant comprises at least one supernumerary chromosome comprises at least one genetic element that can cause haploid induction.

25. The method of claim 16, wherein the supernumerary chromosome is a B chromosome.

26. The method of claim 17, wherein the B chromosome is selected from the group consisting of a corn B chromosome and a rye B chromosome.

27. The method of claim 16, wherein the at least one supernumerary chromosome is an artificially derived chromosome.

28. The method of claim 19, wherein the artificially derived chromosome is a truncated chromosome or a de novo generated chromosome.

The application's sequence listing, which the Patent Office published only in electronic form, follows.

SEQUENCE LISTING (112 sequences)

SEQ ID NO: 1 - DNA, 392937 bp, Zea mays
gggatcccactgtgctggaaagacaccaaacccccccccatccccaggttgtcagcattgcaaccactgctcagtcgaagatgaagctgtggaaggagacttccaggagttccaagattacgacgagttctaggtgtgggttagcggcaacccccagtcggctgcctgtgaaggccgcggttatctacgtttcttttccgcactttgatttattgtaagaactatatggacgtctcagacgtatgatgtaatcgactatttcccttagtaatactattttgagcactgtgtgatgatgtccatgttatgtaactgctgtgtacgtgaataactgatcctggcacgtacatggttcgcattcggtttgccttctaaaaccgggtgtgacacctgattactctcaagcaaagcctataggtagtttaagaggttgagtacaatgagaaacatttcaatcattatttgcaaaagaaacattttgatcatattaaggaaaatcataggagtgaaagaaaaacaatgtgtgcaaataactgaacctcctgcagctccatcatgctggccaaagtatgcttcgacgaattcaaaatatcatcatatgcttgctctatctgcttatcatgattgcaaccttgttcggatgggttcctggcttcctgcaacagcacagtagaaaacaaactggagtttagaattcaacttgagacttcagagttgaaacaaaacctgtattcacatatgtagcaccgatgcatatacaaatacctttatcagaaacatgaagatatgtgaatacattattttctcaataaaagtcatgatagaattcatgcaaatttttttagaaataaataaatgatgaggcatactacaattctaaaagcagtagcagtgcaacacgaacgaacattcaaattgccccacattcttgaaactgtgctgctttgctctcgttccaaaaaaactccgctaaagtaaaacttggaaaggtctggttttgcgtgagccaccaacaccaaccaaactttacgtcactatgacagtttcagcctttcggtcccggcgacagccatggcggacgcgggggtgacagggggtgctggccaagctgggtgagctgacggaggaggaggcgacgacgctgctgcgcgtggacgccgagatacgggcattgtggcagaagctggcctacctgcaggcgctcgtacgcggggccggccgccagcgccgcgaccgcgcaagcgagctgctcctgctctggctacgcgagaccagagaggttgctttcgcgggtggttctgccatacatagcggcgatggctcttcctcccaggactaccatatctacacataacaatcatgctctcatgaagttgtgatgtaataggtcacacgattttaatgtataagattgtgaagagtaaattaattcaaatgaattcatggacatgggacaactatgtgttaaaaacagaatctcctatgtatcctaaccatgtgtaatgacatgacaaaatgacacttgtatatgagcaattaaagcatcatactaccttgtagagttctcttcggcgaatacgttgaatgatttcttttgctttcttcagtttattgttaggagcagtctcgtagacacagtcaagtcctagcattagctcactgcgagagtatcagccattccagactccaggagctcctcccgggtagcctgcctggcaatgggcgcagatatcctcttgagctcactcttaatgctaggttgtaggctccttgcttccaggtccatcttccgaatctgcagacacaaaacaaaaacataaaattacttttcccccaacccccaaattgaagactaaggcacataaacatctcgcaactccgttggaacaccaaaactgcaccgacggaaacgaaaaatccctaatctctgcttttctacccattccccaaatgtcgtatgtcccgttagccaaggggatccccaaaacagaacgtgtcacgacatctatttaccagcgattcagcttcctcaacgccggattggatctcagagagcttctgcttcttcctctctgcggacagacccaccgaaatcagaccaaaacaaacggtcaacaaaagaaggcgttccaagcggcgctactgacgctcggctgcctggccggcgagcctcgcagtcggccctcgatgaaggaggtggtggagacgctggagcgggtggaggcgatgaagagacgggcacgcggcgcgcgtacaccgcccggttcctgcccccccccccccccgacgacgaccatggcgcttcgccaatggcccacttgcctggtcgcccgccgtcgcgtcagcgagcgcgctcagcagctccgtgacccgctcgtcgaaccgcgtggccacggcgagcggcacgaggcctgggttcgtgacgttgaccggggggcggcgggggtgaaagggaattaggctcacacctatttcctaattgattttggtggttgaattgtctaacacaaataattggactaactagtttgctctagtctataagttttacaggtgccaaaggttcataataagccaataaaaagaccaagaaagggttcaaacaaaaagagcaaaagacatcccggaaggcaccctggtctggcgcaccggactgtccggtgtgccaccggacagtgtccggtgcaccagggcactcgaagctgaactcgctaccttcgggaaaatcagagggcgctccgctataattcaccagactgtccggtgaagcaccggactgtccggtgtgccagcggagcaacggctacttcgcgcgcaacggtcgactgcaacgcattcaatgcgcgcctgcgcgcgcagagggcagagcactcacagttggcgcaccggacagtctacaggacctgtccggtgcaccaccggacagcccagaggccccacaagtcagagctccaacgatcgaaccccaacgatctgctgacgtggctggcgcaccggactgtccggtgcgccatgcgaccgcagccttccaacggccatttttggtggtttagggctataaataccccaaccaccccacattcaatggcatccaagtttcccaccttcaacacattacaagagctataacattcaattctagacactccaaaagatcaaatcctctcccaagtccggaatcactccaaatcaaatagtgactagagagagcgacatttgtgttcatttgagctcttgcgcttggatcgcttcttttctttctcattcttcttgtgatcaaactcaattgtaaccaaggcaagagacaccaattgtgtggtggtccttgcaggaactttgtgttccgtttgattgagaagagaagctcactcggtctaagtgaccgtttgagagagggaaagggttgaaagagacccggtctttgtgaccacctcaatggggagtaggtttgcaagaaccgaacctcggtaaaacaaatcatcgtgtctcgctctttatatttctaacgttaacccggcttgtagttgtgcttaagtttgtaaatttcagattcgccctattcaccccccctctaggcgactttcaattggtatcggagccggtgcttcattagagcctaactgctcgaagtgatgtcgggagcatccgccatgagggatctcgggaccggcgacaagaccgcatgctcgggaagaactcactcaagggagtctgcccacaagcataaggaggaatcgtcttcctccatcaagtcccatcggatgggtgacaaaaagaagaagatgaggaaggtggtctactacgagaccgactcttcgtcaccctccacctccggctcggaatcggcctccaccacttcaaagcgccatgagcgcaagaagtatagtaagatgccccttcgctatcctcgcatttctagacgcactccatcactcttcgttccattaggcaaaccacctatatttgaaggtgaagattattctatgtggagtgataaaatgaggcatcacctaacctcactccacaaaagcatatgggatattgttgagtatggagtgcaggtaccaaagaagggagataaagattacgactcggaggaggttgaacaaatccaacatttcaaatccaagtcgagaggagtataataaggtgcaagggttgaagagtgcaaaggatatctgggacgtgctaaagaccgcgcacgaaggagacgaggtaaccaagatcaccaagcgggagacgatcgagggggagctcggtcgcttccggcttcgccaaggggaggagccacaagatatgtacaaccggctcaagaccttggtgaaccaagtgcgcaacctcgggagcaaaaaatgggatgaccatgaaatggttaaggttattcttagatcacttgtgttccttaaccctacgcaagttcaattaattcgtggtaatcctagatatacactaatgactcccgaggaagtaataggaaactttgtgagctttgagttgatgatcaaaggctcaaagaaaattatcgagcacgacggtccctccacgcccgaagcacaaccggtcgcattcaaggcgacagaggagaagaaagaggagtctacatcaagtagacaacccatcgacgcctctaagctcgacaactagaaaatggcgctcatcatcaagagcttccaccaaatcctcaaacaaaggaaggggaaagattacaagccttgttccaaaagggtgtgctacaagtgtggtaagcccggtcatttcattgttaaatgtcctttatctagtgatagtgacaggggcgacgacaagaagggcaagaggagagaaaagaggaggtattacaagaagaagggcggcgatgcccatgtgtgccgcgagtgggactccgacgagagttcctccgactcctcatccgacgaggacgccgccaacatcgccgtcaccaaagggctcctcttccccaacgtcggccacaagtgcctcatggcaaaggacggcaaaaagaagaaggtaaaatcaaaatcctccactaaatatgcatcctctagtgatgaagataatgctagtgatgaggaggataatttgcgtaccctttttgccaacctaaacatgcaactacaggaaaaactaaatgaattaattagtgctattcatgagaaagatgatctcttggactttcaagaggacttcctaattaaggaaaataagaagcatgttaaggttaaaaatgcttatgctctagaagtagaaaaatgtgaaaaattatctagtgagctaagcacttgccatgatactattaccatccttagaaataaaaatactaaactaattgctaaggttgattctaatatttgtgatgtttcaattcccaatcttagagatgataatgttaatttgcttgctaagattgaagaattgaatgtctctcttgctagccttagggttgaaaatgaaaaattgattgctaaggctaaagaattagatgtttgcaatgcttccatttctgatcttagaaataacaatgatattttacgtgctaagattgttgaacttaattcttgcaaaccctctacatctgccattgagcatgtcattatttgcactagatgtagagatattaacattgatgctattcatgatcatatggctttaattaaacaacaaaataatcatatagcaaaattagatgctaaaattgccgagcatgacttaaaaaatgaaaaatttaaatttgctagaagcatgctctatagtgggagacgccctggcatcaaggatggcattggcttccaaaagggaaacaatgtcaaacttaatgcctctcctaaaagattgtcaaactttgttaagggcaaggctcccatgcctcaggataatgagggttacattttgtaccctgccggttatcccgagagcaaaattaggagaattcattctaggaagtctcactctggccataatcatgcttttatgtataagggtgagacatctagctctaggcaatcaacccgtgcaaaattgcctaagaagaaaactcctgctgcatcaaatgatcataacatttcattcaaaacttttgatgcatcttatgttttaactaacaaatccgacaagatagttgccaagtatgttgggggcaaacacaagggatcaaagacttgtgtttgggtacccaaagttcttgtatctaatgtcaaaggacccaaaaccatttgggtacctaaaatcaagaactaaacttgttttgtaggtttatgcatccgggggcccaagttggatcatcgatagcgggtgcacaaaccatatgacaggggagaagaaaatgttctcctcctatgagaaaaaccaagatccccaaagagcgatcacattcggggatggaaaccaaggtttggtcaaaggattgggtaaaattgctatatctcctgaccattccatttccaatgtgtttcttgtagattctttagattacaacttgctttcagtttcgcaattatgtaaaatgggctacaactgtctttttacagatataggtgttactgtctttagaagaagtgatgattcagtagcatttaagggagtgttagagggtcagctatacttggtagattttgatagagctgaactcgacacttgcttaattgctaagactaacatgggctggctctggcatcaccgactagcacatgttggaatgaagaatcttcacaagcttctaaagggagaacacattttgggactaacaaatgttcactttgagaaagataggatttgtagcgcatgtcagacagggaagcaagttggtactcatcatccacacaagaacatcatgatgactgacaggccactcgagctcctacatatggacctattcggcccgatagcttacataagcatcggcgggagtaagtactatctagttattgtggatgattatactcgcttcacttgggtattctttttgcaggaaaaatctcatacccaagagaccttaaagggattcttgagatgggctcaaaatgagttcggcttaagaatcaaaaagattagaagcgacaacgggacggagttcaagaattctcaaatcgaaggcttccttgaggaggagggcatcaagcatgagttctcttctccctacaccccacaacaaaatggtgtagtggagaggaagaatcgaactctattggacatggcaagaaccatgcttgatgagtacaagacttcggatcggttttggatcgaggcggtcaacaccgcttgctacaccatcaaccggttatatctacaccgaatcctcaagaagacatcatatgaactcctaaccggtaaaagcccaatgtttcatattttagagtctttggtagcaaatgcttcattcttgttaaaagaggtagaaaatctaaatttgctcctaaggctgtagaaggctttttactagggtatgattcaaacacaagggcatatagagtctttaacaagtcctcgggactagttgaagtttctggtgacattgtgtttgatgaaactaacggctctcaagtagagcaagttgatcttgatgagataggtgatgaagaggctccgtgcgtcgcgctaaggaacatgtccattggggatgtgtgtcctaaggaatccaaagagcctccaaatgcacaagatcaaccatcctcctccacgcaagcatctccaccaactcaaaatgaggatgaggctcaagatgataaaggagaagatcaagaagatgagccacctcaagatgacggcaataatcaagggggagatgcaaatgatcaagacaaggaggatgaagaaccaagaccgccacacccaagagtccaccaagcaatccaacgagatcaccccgtgaacaccatcctcggcgatattcaaaagggggtaactactcgatctcgtgttgctcatttttgtgaacattactcttttgtttcctctattgagccacaaagggtagaggaagcactacaggattcagattgggtggtggcgatgcaagaggagctcaacaacttcactaggaatgaggtatgtcacttagttccacgtcctaatcaaaatgttgtaggaaccaagtgggtcttccgcaacaaacaagatgagcatggtgtggtgacaaggaacaaagcccgacttgtggccaagggttattcacaagtcgaaggtttggattttggtgaaacctatgcacccgtagctaggcttgagtcaattcgcatattacttgcctatgctacttaccatggcttcaagctttatcaaatggacgtgaaaagtgccttcctcaacggaccaatcaaggaagaggtctatgttgagcaacctcccggctttgaagatagtgagtaccctaatcacgtatataaactctctaaggcgctttatgggctcaagcaagccccaagagcatggtatgaatgccttagagatttccttatcactaatggtttcaaagtcggaaaggccgatcctactttatttactaaaactcttgacaatgatttgtttgtatgccaaatttatgttgatgatattatatttgggtctactaatgaatctacatgtgaggaatttagtaggatcatgacacagaaattcgagatgtctatgatgggggagttgaagtacttcttgtgatttcaagtgaagcaacgctaagagggcaccttcattagccaaacgaagtacattcaagacattctaaacaagtatgggatgaaggatgccaaacccatcaagacacccatgggaaccaatgggcatctcgacctcgacacgggaggtaaatccgtcgatcaaaaggtataccggtcgatgataggctctttactctatttatgtgcatctcgaccggatattatgctttccgtatgcatgtgtgcaagattccaagccgaccctaaggaagctcaccttacggccgtaaaacgaatcttgagatatttagttcatactcctaagtttgggctttggtatcctacgggatccacatttgatttgattggttattcggatgccgattgggcggggtgtaaaattaatagaaagagtacatcggggacttgccagttcttgggaaggtccctggtgtcttgggcttcaaagaagcaaaattccgtagctctttctaccgccgaagccgagtatattgccgcaggccattgttgcgcacaattactttggatgaggcaaacccttagggactatggttaaaaattaaccaaagttcctcttctatgtgataatgagagtgcaatccgcatggcggataatcccgttgagcatagccgcactaaacacatagccattcggtatcatttcctaagggatcaccaaaaaaagggagatatcgagattgcctatattaacactaaggaacaattagccgatatctttaccaagccactagatgaacaaacttagacacgagctaaatattcttgattctaggaatttcttttgatgtcttgcatacatagctcattaatatacctttgatcatatctctttcatgtgctatgactaatgtgttttcaagtatatttcaaaccaagtcataggtgtattgaaagggaattggaatcttcggcgaagacaaaggcttaacctccactccataactcatccttcaccgtcgcttcaagcaactctccaactttggtataatcttcactcatattatgttcgccaaagcaggagaaagtagttaaaggggcttatatttcactcaagtattcgtttttggcgattcatgccaaagggggagaaagtattagcccaaagcaaaaggaccgcaccaccacccattttcaaaaggttttaaaatgatgaatttttcaattgatatcttattatattcaaaagggggagaaagtagcattttcaaaattgatatcttaaaaccctcttgaacactatgagtaggatttttgaggggggagttttgtttaagtcaaaggaaaagcatttgaaacagggggagaaaatttcaaattttgaaaatgcttctcaaaatcttattcatttacctttgactatttacaaaaggatttgcaaaaacaaaacatgtggtgcaagcgtggtccaaaatgatgaaaataaagaaacaatccatgcataacttatgaaaatatttattggttcaattctaagtaacctttgcacttacattatgcaaactagttcaattatgcacttctatacttgctttggtttgtgttggcatcaatcaccaaaaagggggagattgaaagggaattaggctcacacctatttcctaattgattttggtggttgaattgtccaacacaaataattggactaactagtttgctctagtctataagttttacaggtgtcaaaggttcacaataagccaataaaaagaccaagaaagggttcaaacaaagagagcaaaagacatcccggaaggcaccctggtttggcgcaccggacagtgtccggtgcaccagggcactcgaagctgaactcgctaccttcgggaaaatcagagggcgctccgctataattcaccggactgtccggtgtgccagcagagcaatggctacttcgcgcgcaacggttgactacaacgcatttaatgcgcgcctgcgcgcgcagaggacagagcacgtgcagttggcgcaccagacatcctacaggacctgtccggtgcaccaccggacagcccagaggccccacaagtcagagctccaacggtcgaaccccaacggtctgctgacgtggctggcgcaccggactgtccggtgcgccatgcgagagcagccttccaacggccttttttggtgttttggggctataaataccccaaccaccccacattcaatggcatccaagtttcccaccttcaacatattacaagagctatagcattcaattctagacactccaaaagatcaaatcctctcccaagtccggaatcactccaaatcaaatagtgactagagagagcgacatttgtgttcatttgagctcttgcgcttggatcgcttcttttctttctcattcttcttgtgatcaaactcaattgtaaccaaggcaagagacaccaattgtgtggtggtccttgcgggaactttgtgtttcgtttgattgagaagagaagctcactcggtctaagtgaccgtttgagagagggaaagggttgaaagagacccggtctttgtgaccacctcaacggggagtaggtttgcaagaaccgaacctcggtaaaacaaatcatcgtgtctcactctttatttgctcatgatttgttttgcgccctctctctcggactcgtttatatttctaacgttaacccggcttgtagttgtgcttaagtttgtaaatttcagattcgccctattcaccccccctctaggcgactttcagggggaagagtggaagggcaggcggggtagggcgatggctggcgcgagatccggggcggcagggaagggtgcctgcctccttccatgcgcgtgcgtgggatacatcggcagaaccgtgcaccaatccattgtgtggatgcctacgttagaaacttaagtatgtatcctaaccatgtgtaatgacatgacaaaatgacacttgtatatgagcaattaaagcatcatactaccttgtagagttctcttcggcgaatacgttgaatgatttcttttgctttcttcagtttattattaggagcagtctcgtagacacagtcaagtcctagcattagctcactgcgagagtatcagccattctagactccacgagctcctcccgggtagcctacctggcattgggcgcagatatcctcttgagctcactcttgacgttgttgaggtcagatttataatccctcggctttgcaagcaaaccagccttaatgctaggctgtaggctccttgcctccaggtccattttctgaatctgcagacacaaaacaaaaacataaaattacttttcccccaacccccaaattgaagactaaggcacataaacatctcgcaactctgttggaacaccaaaactgcaccgacggaaacgaaaaatccctaatctctgcttttctacccattccccaaatgtcgtatgtcccgttagccaaggggatccccaaaacagaacgcgtcgcgacatctatttaccagcgattcagcttcctcaacgccggattggatctcggagagcttctgcttcttcctctctgcggatagacccactgaaatcagaccaaaacaaacgatcaacaaaagcaggcgttccaagcggcgcaactaatgctcggctgcctggccagcgagccaagcagtcggccctcgatgaaggaagtggtggagacgctggagcgggtggaggcgatgaagagccgggcgcgcggcgcgcgtacaccgcctggttcgtgccccccgacgacgaccatggcgcttcgccgatggaccacctgcctggtcgccccaccgccgcatcagcgagcacgctcagcagctctgtgactcgctcgtcgaacagtgtggccacgacgagcggcacgaggcccgggttcgtgacgttgaccgggggcagcgggggaagagtggaagggcaggcggggtagggcgggggctggcgcgagatccggggcggcggggaagggtgcctgcctccttccatgcacgtgcgtgggatacatcggcagaaccgtgcaccaatccgttgtgtggacgcctacgttagaaacttaagtatgtatcctaaccatgtgtaatgacatgacaaaatgacacttgtatatgagcaattaaagcatcatactaccttgtagagttctcttcggcgaatacgttgaatgatttcttttgctttcttcagtttattgttaggagcagtctcgtagacacagtcaagtcctagcattagctcacagcgagagtatcagccattccaaactctaggagctcctcccgggtagcctgcctggcattgggcgcaaatatcctcttgagctcactcttgacgttgttgaggtcagatttatactccctcagctttgcaagcaaaccagccttaatgctaggctgtaggctccttgcctccaagtccatcttccgaatctgcagacacaaaacaaaaacataaaattacttttcccccaacccccaaattgaagactaaggcacataaacatctcgcaactccattggaacaccaaaactgcaccgacggaaacgaaaatccctaatctctgcttttctacccattccccaaatgtcgtttatacatgcatggggatgggagctaggtaggtcaagttagaaagccacacacggattcatcatcttcatgttcggagactgttcctgcttggcggcaacaacccgttgggtaggctgaacagccgactcctcttgggctctgagatcctcacctgtgttattgttgtcaccagtgcatcaactataccgcattcatctcgctcttcagagttgtcacttgaggattttgaagatgaagactcacagtaaccaaacctgactatctcccgatgaatcatgggagctgcagttttgttagtatcccatatgttagagaattcagctttctgcgggcaatcagtgtagaataagacccatggtgccctgtgttgaaagccattaggaaaagtcaatgataaattgagaatcatatatataaagcacaagttacaagggtgcttgaacttacggagaacttctttggcattgggccttgaagagacctctcgattaagcattcggccaatgagatcatgagcaagaagtgacacggatgcacatattctggtgggatctaaaaaaacatgctcctcactgctccccatttaatctccaccgaaatcagtccagaatcaaccctctgctcccccaccctactctcccgctggaatcactataatcacttcactaaagaatcaatgcgctagggttcgaaaagaaaaaggtattatgcaatactataagaatagccatgattattgcttagaaaataatgatcaaacaatctgtcaatattctagaaagaaaaaacagaattgtcatatgcaatgaattgtgtttcaacatattacctgtacagcaacgaatgcattgcaacaaaacagggtaaggccagccaatacaatcacaccatggtttcatcatacatagttttacaggaaaacaaagacatgcagtgttagtctgatcacatacactagaaaactgctaatacttgacaaaataattgacattttgtggctcccctttgccatcatttttttgagttagcatgtttgtgagctatctaacgtagaaaaagcatgtcaaatcagtagtggcctattatagcacaaggcagtagtgagcagcaaaattgctcatacaaacatactctactttcgtcaggctattactgaaaatgagaaggccaaccttcaagaatttgatatctaggcatagtagaaggggtaactggaatagtaatatggtatttcgtatgatgtatctaatttagatcatcttttttgcttctaggtactaatttaaaccaatgtgactctattctttagtcctattttttttctccttgctaataattttatttattctcaagctaaataacacatgcattttcgagtgtaaggacttcttagataaaatgagcataattcctaattcttatgctggtttacacatgtgcataacagatgtccactgtgtgagtacgcaagtggatctgaacttgtaaaaaacaaatgagtaaagcacggagacggacctggggatccgtgtccgagaaaagagggagagatgggattcgtcatctataggagttttgaatgcatttcccttggtatatatccaggcaaaaagaacaaaaaactcttggagtattctgatgccacttctgagttcattactgaaccagctgcacttacattggagatgttggtgaattgtacgatgaggaggccagagggcagcatgacctaggggctgaggcaacgatagtgcggtccagagatcgagtccatggaacaagagcttcttgtagctaatcaggccactgcacatcgagaagcaacaattagggagcttcaatgtgaaacaaaaaaaggaaactgagattgagagattaaatgaattgacgatgtcaggttggtttgcagcacaagagttaaatgaactggcacaaatgacattcaagaataaagatgatatcaagaatacaatcaatgacttcaaacaggtgatgtatttagctagatgttgtgtgttctgaactaatagcttcgaaagtggctttgaccttctcgcgcaaacaagtagaagatcaggcgacacagttgattaaccaagtgcaggaactcgcagatcaaaaagcactggctatttctcaaggaaagtcaaatgggctcagtactgtaaaatcttgttgtagtgaccttgaagctttaaattaaactggaactccattcacgtataaaacatgtattcataccaatggctgttatgcgtgtacctaggaaacggagggcagcggggcggtcaggagtactaatctccttcagtcgcggtgacaagataatggagtcctctccttgatccccaaactcctgaagaaaagacacaatgaaatcagaagcggacatatgcatatttggctaagttagtgacgactacaaatgtagatgaatatgagcttgtgtggtccaattcacatttgatctcaattcatatactgatgtagacctaagatgttatgcaaatgaacacgaaaacattcaaacacgataaaaagagaataaataacccaagaaaccaaggacctgttgctagccgctgaaagggaaatgtgcccttgggccatttctaagtattttggagattgagtgccaacacaagtggtcatgtgttaatctatgccaaatgatggacaaagtgcaaatcaagagtaaaggtatgtttctaatacttagtacattgttttggagactaatgtaatgtgtctaagtgctagaaacaggaaaagaccaatttggaaaagacttggctgtgcagccaagactctgcgcagtctgggtgcaccgaactgtccggtggtgcaccggacaatgtctggtgcgccagactggctctagcgaactagctgctctcgggtttcgtcggcggcgtacggctataaatcaccggactgtccggtggtgcaccggactgttcagtgagccaacagtcggtcgagccaacggtcggccgcgtaatccgcgcgcgacgcgtggcagagccaacggtcagaagggggcaccggactgtccggtgtccatcggacagtgtccagtgcgccaacggctctgaatctccgacggtcggcttcgctaaaaaaggaaagaaatctgcaccggacagtgtccgatggtgcaccggactgtccggtgcgccaggcgacagaaggcaagaattgccttcctggaatgctctcaacggctcctagctgccttggggctataaaagggacccctaggcgtatggaggaacacacaaagcattctctaagcgttcctaagcaccaagactccaattccgcgcattcgattctttgtgatagcaactagagctccatttgagtagagaactctttgggttgtgttgtgagctcgagttgtgacttgtgtgcgtgttgtgctctgattttgtgtcttgtgtgcgttgctcatcccagccttactttcgtgcttctttgtgaacatcaaattgtaagggcgagaggctacaagttgtggagattcctcgcaagcgggatatagtgaaactaagcaaaacactgtggtattcaagtgggtccttggaccgcttgagaggggttgattgcaaccctcgtccgttgggacgccacaacgtggagtaggcaagtgttggacttggccgaaccacgagataaaccactgtgtctatctgtgttgatctttgtgtggttatcgtgtcttgcaagaactctctagtcacttggctttattgtgctaactcctaatcaagttttgtggcattaagtttcaagtttttataggatcacctattcacccccctctaggtgctctcaattggtatctgagtcgttctcttcacgtaagggactaatcgcccgaagagatggatcctaagggcaaggggatggtggtcaatgataaggagaaggagtccttcgtcaatgatccaaaagatgacaagcctactgactcgggctcgagccacaaaagaaaagacaggaagaagaagaaaacaaggtgcatcaaggagatcgtctactacgacgacagcgacgagtcctcttcttcccaaaaggacgacgacaactacgagaaaaagaaaacagtcaattcaaacttttcttttgattattctcgtattccgcaaagtacaaatgctcatttactctccattccacttggtaaacctcctcactttgatggagaggactacggattttggagtcacaaaatgcgtagtcacttgttctctctccatccaagcatatgggagatagtagagagtggaatgcaatttgatagtactgatagtcccatatttatcaatgagcaaattcacaaaaatgcacaagctactactgttcttctagcatcattgtgcagggatgaataccataaggtgagcggcttggataacgccaagcagatctgggacaccctcaagatctcacatgaggggaacgatgtcaccatgctcaccaagatggagttggtggagggcgaacttgggagattcgcaatgatcaggggagaagagccaacccaaacgtacaaccggctcaagaccctcgtcaacaaaataagaagctatggaagcacgcgatggacggatcacgacgtcgtccgcctaatgctaaggtccttcactatccttgatccacatcttgtaaacaatattcgtgaaaatcctaggtacaccaagatgtcgcccgaagaaatacttggaaagttcgtaagcgggcggatgatgatcaaggaggcaagatacgtcgatgatgcgttgaatggcccaatccacgagcctcaaactgtggctctcaaagcaacgaggagcaaggaggcgctacctagcaaggtggcgcaagttgaggcggtcgggcttaatgaagaagaaatggccctcatcatcaagcgattcaagacagcactaaagggtcgcaaggagcatcccaacaagacgaaggggaagcgctcatgcttcaaatgtggtaagattggtcatttatcgctaattgtcccgataatgatagtgaccaggaacaagagaagaagagggaaaagaagaaggcttataagaaggctaagggtgaggcacaccttggcaaggagtgggactcggattgttcgtcgtccgactccgacaacgaaggactcgtcgcctcggccttcaacaagtcgttcctcttcccccaacgagcatcacacatgcttaatggcaaaggagaagaaggtaaacactcgaaagtctacttatgcttctagtgatgatgaatctagcgatgatgaaatagactatgctagtttgttcaagggcttagatagaactaagattgataagatcaatgagttgattgatgccttgaatgataagaatagattattagaaaagcaagaggatcttttgtatgaagaacatgataagtttgtagaagcacaaaattctcttgctttagaaattaaaagaaatgaaatgctttcatgtgaattgtctacatgccatgaatctatctctagcctaaaaagtgttaatgatgatttgagtgctaagttagaaatagctagtaaattaacctctcgtgaagaacatgttacgatttgcaataggtgtaaagatttcaatgttgatgcttgtagtgaacacctagtttgcatttctaaactaaaagatgaagtggctagtcttaatgctcaacttaagactagcaaaaatgattttgataaactaaaatttgcaagggatgcctacacggttggtagacacccctcaattaaggatgggcttggcttcaagagggaagccaagaacttgacaagtcataaggctcctatctccatcaaggagaaagggaaggcccctatggcaaatagtattcaaaagaaccatgctttcttataccatgataggagatattccaggaatgttcatcatgatagaagttgcaatgatgtcatttcacatgcttatgattcaaatgcaatgtttgcttcaagttcttctattatgcatgatagaaatttggctaggaaaaatatcattcatcatgtgcctaggagaaatgctcatgtacctaggaaaacaagtaatgaaccttctacaatttatcatgctttaaatgcttcctttgatatttgtagaaaggataagaaggtggttgctagaaaattaggggcaaaatgcaagggagataaaacttgcatttgggtccctaaggctatttgtactaaccttgtaggacccaacaagagttgggtacctaagacccaagcctaatttgccttgcaggtttatgcatccgggggatcaagctggattatcgacagcggatgcacaaaccacatgacgggggagaagaagatgttcacctcctacgtcaagaacaaggattcccaagactcaatcatattcggtgacgggaatcaaggcaaggtcaaaggactagggaagattgccatttcatccgagcactctatttctaatgtgtttttagttgagtctcttggatataacttattgtctgtgagttagctttgtaatatgggatataattgcttattcacaaatgtagatgtgtccgtctttagaaggagtgatggttcattagcttttaagggtgtattagacggcaaactctacttagttgattttgcaaaagaggaggccggtctagatgcatgcttaattgctaagactagcatgggctggctgtggcatcgccgcttagcacatgtggggatgaagaaccttcacaagcttctaaagggagaacacgtgataggactaacaaatgttactttcgaaaaagatagaccttatgcagcttgtcaagcaggtaaacaagtgggaagctctcatcataccaaaaatgtgatgaccacatcaagacctttggagttgctacatatggacctcttcaggcccgtcgcctacctaagcttaggaggaagtaagtatggtcttgttatagttgatgatttttcccgcttcacttgggtattctttttgcaggataaatctgaaacccaagggaccctcaagcgcttcctaaggagagctcaaaatgagtttgagctcaaggtgaagaagataaggagcgacaacgggtcggagttcaagaatcttcaagtagaagagtaccttgaggaggaaggaatcaagcacgagttctccgctccctacacaccacagcaaaatggtgtggtagagaggaaaaataggacgctcattgacatggcgaggacgatgcttggagagttcaagacccccgagcgattttggtcggaagccgtgaacacggcttgccacgccataaaccgggtctaccttcatcacctcctcaagaagacttcgtatgagctcctaaccggtaacaaacccaatgtttcatactttcgtgtatttgggagtaaatgctacattctagtgaagaaaggtagaaattctaagtttgctcccaaagctgtagaagggtttttgttaggttatgactcaaatacaaaggcgtatagggttttcaacaaatcatcgagtttggttgaagtctctagcgacgttgtatttgatgagactaatggctctccaagagagcaagttgttgatcttaatgatgtagatgaagaagacattccaacggccgcaatacgcaccatgacgattggagatgtgcggccacaggaacaaaaggagcaagatcaaccttcttcctcaacattggtacatcccccaactcaagacgatgaacaggttcatcaagaggaggcatgtgatcaagggggagcacaagatgatcatgttatggaggaagaagcacctcaagccccttcaactcaagttcgagcgacgattcaaaggaatcatcccgtcgaccagattttgggtgacattagcaagggagtaactactcgctctagattagttaaattttgtgagcattactcttttgtctcttctattgagcctttcagggtagaagaggccttgctagatccggactgggtgttggccatgcaggaagagctcatcaacttcaagcgaaatgaagtttggacactggtgcctcgtcccaagcaaaacgttgtgggaaccaagtgggtgttccgcaacaaacaggacgagcacagggtggtgacaaggaacaaggcgagacttgtggcaaaaggctatgcccaagtcgcaggtttggactttgaggagacttttgctcctgtggctaggctagagtctattcgtattttgttagcctatgccgctcaccattccttcaggttgttccaaatggatgtgaagagtgctttcctcaacgggctaatcaaggaggaggtgcacgtggagcaaccccctggcttcgaggatgaacggtaccccgaccacgtgtgtaagctctctaaggccctctatggacttaagcaagccccaagagcatggtatgaatgccttagagactttttacttgctaatgctttcaaggttgggaaagccgatccaactttattcactaagacttgtgatggtgatctttttgtgtgccaaatttatgtcgatgacataatatttggttctactaaccaaaagtcttgtgaagagtttagcagggtgatgactcagaaattcgagatgtcgatgatgggcgagttgaactacttccttgggttccaagtgaagcaactcaaggacggcactttcatctcccaaacgaagtacacgcaagatctgctaaagcagtttgggatgaagaacgccaagcccgcaaagactacaatgggaactgacggacacaccgacctcaacaaaggaggtaagtccgttgatcaaaaggcataccggtctatgatagggtccttactttatttatgtgctagtagaccagatattatgctaagtgtatgcatgtgtgctagatttcaatccgatccaaaggagtgtcacttagtggttgtgaagcgaattcttagatatttagtcgctacgccttgcttcgggatctggtatccaaaggggtctacctttgacttgattggatattcagactccgactatgttggatgtaaggtcgatagaaagagtacatcggggacgtgtcaattcttaggaaggtccctggtgtcgtggaattctaagaaacaaacctccgttgccctatccaccgctgaggccgagtacgttaccgcaggacagtgttgcgcgcaactactttggatgaggcaaaccctcaaggactttggctacaatctgagcaaagtcccactcctatgtgataatgagagtgccatccgcatggcggataatcctgttgaacacagccgcactaagcacatagacatccggcatcactttttgagagatcaccagcaaaagggagatatcgaagtgtttcatgttagcaccgagaaccagctagccgatatctttaccaagcctctagatgagaagaccttttgtaggctgcgtagtgagctaaatgtcttagattcgcggaacttggattgatttatagcatacatgtgttttatgccttgatcatgttcctttatgcattttgttgtttatgtatggtgctcaagttgtacaaacactccccggacctcacaagtccatttgcaagtaatgcacatatttagggggagttgtgctacaacttgaccccttgagactaactgtgtgcttgagtttgcttgatttagtctcaaaggtggattgaaaggaaatgttggacttggaccatgaaagacttccactgcactccgatgaaagagtaactaactccaagttcatcttcatgctcttattgcctttttactcttaattgaagattttggtgaggcaatggggttttaagggccaagatttatcccgttctggtgcttgatgccaaagggggagaaaataaggccaaagcaataaatggatcagctaccacttgagaattttgaaaatagtagaatagagctttttggtttgtcaaaattctcttattgtctcttctgtcaaaagttggtctcttgtggggagaatgtttgattatggaaaaaagggggagtttttgaaatctttgatcaatttctcatggaacaactctctttatgtttcaacaagtgtgtttgacttagagataggaaattgaggttgatttgcaaaaacaaaaccaagtggtggcaaagaatgatccaaatatgccaaatttgaatcaaaacaattttttgttctcatttgcattgatgttgcacttcttttagttgctttttgttgtgttggcataaatcaccaaaaagggggagattgaaagggaaatgtgccattgggccatttctaagtattttggagattgagtgccaacacaagtggtcatgtgttaatctatgccaaatgatggacaaagtgcaaatcaagagtaaaggtatgtttctaagacttagtacattgttttggatactaatgtaatgtgtctaagtgctagaaacagaaaaagaccaatttggaaaagacttggctgtgcagccaagactgcgtagtctgggtgcaccggacagtgtctggtgcgccaggctggctctggcgaactggctgctctcgggtttcgtcggcggcgtacggctataaatcaccggactgtccggtggtgcaccggactatccggtgagccaacagtcggccgggccaacggtcggccgcgtaatccgcgtgcgacgcgtggcagagccaacggtcagaagggggcaccggactgtccggtgtgcaccggacactgtccggtgcgccaacggctctgaatctccaacggtcggcttcgctaaagaaggaaagaaatccgcaccggacagtgtccggtggtgcaccggactgtccggtgcgccaggcgacagaaggcaagaattgccttcctggaatgctctcaacggctcctagctgccttggggctataaaagggacccctaggcgcatggaggaacacaccaagcattctctaagcgtttctaagcaccaagactccaattccgcgtattcgattctttgtgatagcaactagagctccatttgagtagagaactctttgggttgtgttgtgagctcgtgttgtgacttgtgtgcgtgttgtgctctgattttgtgtcttgtgtgcgttgctcatcccagccttactttcgtgcttctttgtgaacatcaaattgtaagggcgagaggctccaagttgtgtagattcctcgcaagcgggatatagtgaaactaagcaaaacaccgtggtattcaagtgggtccttggaccgcttgagaggggttgattgcaaccctcgtccgttgggacgccacaacgtggagtaggcaagtgttggacttggccgaacaacgggataaaccattgtgtctatctgtgttgatcttcgtgtggttatcgtgtcttgcaagaactcctctctagtcacttggctttattgtgctaactcctaatcaagttttgtggcattatgtttcaagtttttataggatcacctattcaccccccccccctctaggtgctctcagccgccacatatgcatatttggctaagttagtgacggctacaaatgtagatgaatatgagcttgtgtagtccatgagacatatgcggccttaaaattcaaaatcaaccacaaccaccaaaaaacatcttacacgtaggggtggtaatggatcatgatcctaatgcttcttcataattcatttgagcccttaattaattttagttcaaaaatgaatagaaatagagctcaattctaatctgatccttaatttttatagtataaaatttagaacccattacccccctacttacacccccccacacacactataaactcatattcaaatatgtatcaggaaggggggttcaacagagcagggccctgtttggggaaactgtagcttctccaaaagcatctcctggagagctgggaagctgctctgagggagcttcactgtttttagtataattatagcttttgaagcttttaccggcttgaagaagctgctctgtttggggggagcttctagcttttcttttggagaagcaaaagctaccagaagctccccaaaacaggacccaggacagtcactgaattgccaaacaactcttgagggtccttgtatatattatataagtcaccttttaggcttatgaattgtacaaatttaggcttatcagagagaagatggtacaggataagagtattctagagataactgatgatggcaaagtagtagtgcacaagataaacttcaggtgacaaatcaatactaaaaaaactattacacctttgccagtattaagcagaagagataaattatgatatttgaatgagaatatatggctagctacatacagttttggatagctcactacccatctccatggttcgcaagcacagagaaattatttcagtttgcaacaaaaaactgatgacttcagtatcatcaacctgcattattaccaaaaggaaaattaataacctcatttacagaagtattatttttagaacaaacaggtacttattatattattatgtattttttaataaaatgaagggaacaggcaacctactgatcgaattgaataacttattgggcagagagcagcagtataccttggatgcaacctactgatccaattgaataaccttggatgcaacctactaatccaattgaataacttattgggcagagagcagcagttagcttgttacacagctaataccttcatatgaaactggatttgtggcaactgtcatcgcaatttgatggctcatataaaatgacctacaggctacaagcaggatggtaacataatatatcgccaaactatagaggtatttaacaaaattaaaatacaagattcattttttttcttatttgcatgggtgtttttagtaccttagctgccacttttactatattgtggctatctcaaagtggtttctgtattaaaaaatgaactctattaggaagctagagcagacttcagttacgcataaaagaaatgcaattgccgagacgtgataagcatttcaaatactcatattcaggtgattatcacaagtagacaagtagttacttgaaatcataggggtgcaagcagctgaaaataaacaaatgcttagtgtcatgcagtgtttttcaagagctagccaacttctaagttatactgattagaccgttgaggtccaaatgttgatgaaaccacgtgccccagtcaccagtccagtttttttcaagcactaatggttggttagttatttctattgcaaaatttaccttgtctgcaatctctgtacttctgaccactcgtcattgtctccatttgaggcagaaggaatttctgggatcaagtaaagagttgtgttgtagtttttacattagaacaagaacaatatagagagcagcaataccattggcatcctttgtagcctgattactctcaagcaaagcctataggtagtttaagaggttgagtacaatgagaaacatttcaatcattatttgcaaaagaaacattttgatcatattgaggaaaatcataggagtgaaagaaaaacaatgtgtgcaaataactgaacctcctgcagctccatcatgctggccaaagtatgcttcgacgaattcaaaatatcatcatatgcttgctctatctgcttatcatgattgcaaccttgttcggatgggttcctggcttcctgcagcagcacagtagaaaacaaactggagtttagaattcaacttgagacttcagagttgaaacaaaacttgtattcgcatatgtagcaccgatgcatatacaaatacctttatcagaaacatgaagatacgtgaatacattattttctcaataaaagtcacgatagaattcatgcaagtttttttagaaataaataaatgatgaagcatactacaattctaaaagcagtagcagtgcagcaggaacgaacattcaaattgccccacattcttgaaactgtgctgctttgctctcgttccaaaaaaactctgctaaagtaaaacttggaaaggtctggttttgcgtgagccgccaacaccaaccaaactttacgtcattgtgacagttttagcctttcggtcccggcgacagccatggcggacgcgggggtgacgggggtgctggccaagctgggtgagctgacggaggaggaggcgacgacgctgctgcgcgtggacgccgagattcgggcattgcagcagaagctggcctacctgcaggcgctcgtacgcggggccgaccgccagcgctgcggccgcgcaagcgagctgctcctgctctggctatgcgagaccagagaggttgctttcgcgggtggttctgccatacatagcggcgatggctcttcctcccaggactaccatatctacacagaacaagcatgctctcatgaagttgtgatgtaataggtaacacgattttaatgtataagattgcgaagagtaaattaattcaaatgaattcatggacatgggacaactatgtgttaaaaaacagaatctcctatgtatcctaaccatgtgtaatgacatgacaaaatgacacttgtatatgagcaattaaagcatcatactaccttgtagagttctcttcggcgaatacgttgaatgatttcttttgctttcttcagtttattgttaggagcagtctcgtagacacagtcaagtcctatcattagctcactgcgagagtatcagccattccagactccaggagctcctcccgggtagcctgcctggcattgggcgcagatatcctcttgagctcactcttgacgttgttgaggtcagatttatactccctcagctttgcaagcaaactagccttaatgctaggctgtaggctccttgcctccaggtccattttctgaatctgcagacacaaaacaaaaacataaaattacttttcccccaacccccaaattgaagactaaggcacataaacatctcgcaactccgttggaacaccaaaactgcaccgacggaaacgaaaaatccctaatctctgcttttctacccattccccaaatgtcgtatgtcctgttagccaaggggatccccaaaccagaacgtgtcgcggcatctatttaccagcgattcagcttcctcaacgccggattggatctcggagagcttctgcttcttcctctctgcggatagacccaccgaaatcagaccaaaacaaacgatcaacaaaagcaggcgttccaagcggcgcaactgacgctcggctgcctggccggcgagcctcgcagtcggccctcgatgaaggaggtggtggagacgctggagcgggtggaggcgatgaagagccgggcgcgcggcgcgcgtacaccgcctggttcctgccccccgacgacgaccatggcgcttcgccgatggcccacctgcctggtcgccccgccgccgcgtcagcgagcgcgctcagcagctccgtgacccgctcgtcgaaccgcgtggccacggcgaacggcacgaggcccgggttcgtgacgttgaccggggggcggctggggaagaatggaagggcaggcggggtagggctggggctggcgcgagatccggggcggcggggaagggtgcctgcctccttccatgcgcgtgtgtgggagacatcggcagaaccgtgcaccaatccgttttgtcgacgcctacgttagaaacttaagtagtagaagagatttgaaacaggatgggttctgccggcttctctcttctttggaaaattttgtcatctcatatatagcaagacaatggttctccttcataagttttagtttttagtgtaatgatggcaattacatttttccatgaatccatgataaacagaaggttgggtgatagctcacaaaataattaattagttgggctatcttgtgtacacggttagtggatacaacatactctctctgagtcgaaatggaagctataggactatactttgccaaactttttagcttgttccattaacatatgaaaactattatcataacaaaggttagtatattcatcttgcaaaacacatttttaatatttttttacaatttagaatggtgtgttttaaaagctaagtaaaagttgtagcatcaaaggcggtacatattccattttaataaaaacactaaaaatgtctaatatctaatactttcatctgtcctaaattataagacgttttagatttttacatttttattatgcatttaaatatgcaccatatctagatatatatagcaaaagcaatgtatctcaaaaaagaaaatggctatcgccaaattatttcacagaccagcccatgaaccaatacaacaagcagggcaacaacataaaccatgcaaaaattgtaccagtaagtgaaaaagaaaaataacgcacattcaattttcatgctactagcttcacctctcagagcaagaaacaagctaacatgttctatggtagatttactattataatcaccaatttttttttgtaaatttggtaccctccaactatgagtagcttccaaaaaaatcaaaaaaaattgaagcatacaacttgttataagtgtttctactaggcttaatctatacaccaagctattctcaataaatttagacatctcatttttatactcattcaaagctttattcaagtcggtgacagaagttactagtacactattaactacaggatttttactaggtaaattccatgggttaggggaatcgtattatacctcaccgaaacttgattctctatttgttccataaccggttcatgaattttgattcgaattaggagtggaagtggtcactggcatagatgcattaactccgcctttgtttaccttatcgatttcaaatattgaagaggccaattcagctttattggctactacataaagccttaaatttccatagtaattataagccatgccacattgaggttgcttaagagcaaattcttgaaccgataaatcaacataatctgttgttttatcctctagttcatcaaagtgtgccatggtcatattagaaagagccacaatattattgtcgttaacatgttttgattttttagaacattttagaataattagcatggataggataaggattagttacctcactatcaacttttatctctagcgtagcagatgaagaagcaacaatatcaccaaagttagggccacaaaattgagccaccttgtccctgagaatgtattggtcagcttctgccttacatttaaagacacccaagagatagagggctcctttggaacagagaaattttgtttgtttcttgcgtttttctgtgaaaatggatcgattcgtataaaatttctatgaaattttctgtcaagaggagatagaggtgactgacagtggcaaaccgtcggcaagcgtggcgcgccccgtgctgatccagcgctcatggcgtggccgtcgcatgcagaaagctgccgctggccaacccggttccatttatcagtgaactttaccagcaattaaaccgaaggatccttaaattttggaagggctctataaactccttacatcaattgcctcaagtaatgcttctatatacattcctaatatggagtgcttgccattaataggggtggaaatgagccaaaccgaatcgagctcggctcgctgtggctcgattatttaacgagccgagctcgtctccgctcgcccctctaacgagcctgaaaagctgtcttctcggctcgctccttgctcgcagttacgctccaaattatattataaaatcttaaaaataatttaaataatatattttaaattagtaaaataaatatattactaatattataatatagaaaatagaataaatttgtatagtaatatcaaataatacaaatttattgtctatttggtactaacattttatgctaattagaattttatgtaacaaactagtatggtgtccgtaagttgtaacagaacacaaactattcgttaaatgcttattacctgcgcatatctatgttcttgaagcgaagtggtagacatgttacctcatttaaacaagatctatctatgtgaagtaactgttgggaacaggcttattaatctctgcaacaccaactatctagaattatgactactgcagattacgacgtggtaaactagttacctcatttaaacaaactattcgttaaatgcttattacctgcgcatatctagacgacgtaaagatctatctagtattgtgcacgtgtgtctcctgcccaatgttgacctcaggcgagccgtggctgtgtttggttggcctcacgagccgtgactgtctctcacccaaagcgagccggtgattgcgtctcccacccgaggttggccccgcgagccgtgactgtctcccgcccgaggttggcctcgggtgaggcgtgactccgtctcccgcccagggttggcctccggtgagccgtgactgtgtgtcccgcccagggttcgtctcggacgaggcatggctgcatctcccgtccagggttggcctcaagcgagccgtgactgcgtgtgccgcccgaggttggccttccgtgtcgtccgccaaagggtttccacgcgacgccctgctcccagatctagtggaggtgacagaggcgagggggcgagggagaggtagcgagtcgaggcatcatccatggaggcggtggcggtcctgctcgcagatccggtggaggcgacagaggggagaggagcgcgggcagcgatagacgcgggtgcattgcgagcaggatgttttctagagggtgttcccagcgctgcggaggtgaaggcgggcaggcatcgaaggcggggctgtagacgctgactttacactcttaatagggagggcggcaatacccgacatcgcaggcgagtgatggggcgggagacacgacgacctttggcgtccgtcggaccatgccgcgagggagaggggcggaggagtgcggcgggggagggagacagagtagaagacatatcaactctaatggggggaggcgtgcggactagagatcgcaatgggtaaaaatccgctgggtattacttgcccaaacccatacccatgacgggtataaaattttgcccaaacccatacccacgcgggtttcgggtacccaacgggttttccatacccactaacatcaacataaaaaataattcattatgtaaatgacaatcaatacattaataagctagcgtacaaggaacaagtataactaattttagcctaaaatttgttacatgaagtttattttaattagaacatattcaattaataatattatgagacatatttataaggaatgctgattttaaggcgggttttaaaaacacatgggtttgcgggtatgggtagtggaagaacaaactcatgcctacgtacccgttgggtttccatttaacccattaacaaacctatgggtagacaaactcatactctaatagagaaaaatccaccggatttcgtgtacccattgccatctctagtgcggactcagctggggggggtccagtccagtcgcacctaacctaagccaaggaaagcagcaggtgcccccgcgcctggcctgcctcgccactcattccgtcgccgcacgctccgacccccacgcgccgcacgcgtgctggtgcccagtgcccactcgcagtcggattccgaccctccctccgttcccggcaaacccttgcggttcccaacctggcagtggaacgcagcacggaccctctcttctcttctctccaagggcaacggacgactcatgatgcagcagcagcagcctccaaacaatcatggccagcaggataggagacgggcagcagagaaacaaaaccctcctggaggatgtgcacgtttacaagacttacttaactttgtagtacacagaactattatatataactaccaaagcaaacatcagccaaagcaggagcacaacgcgtatataaagcaggagccaccacacgcacgggacgacccagcgctttgcatggaatgggggcttcgctttggatcacgctcagcggaaagatgtttctagcttttgcataccaacccacgatgaggaagatgggtgatgtgcagccaccgacagtgagtcgggtaggagaagatccgagctcctctgggactgaactgaacagatgtttctcctctcaccagaagccagtggcttcggccttcgacaacaaagccacgacgaggagagaggcgctagagggagacagctcccagcgtcttcactttcagcttcaggtactgcaagtagcagatcgcttcgtccagaacagccgcggcgtctttcgcgatgcccccggggaccatgttcctgagcgcggcaacagtctcctggatcctctccctcctccgcctctgctcgtcggggctgtcgccctctgccgcttccgcttccgcctcccccagagcaaacctgcgcccgctttccacctccccgacgcagcacgactgcgcgtcgcggtcgttcgcaagttcaaccctctgctcctgctccatggaacgctcaggaggccttgctgaactggccgtgtcgacgacggacttgtcgatgcaggagctgagccttctcttcttggctgccggcggcgcagcgccagcgctggccaccgactccacgctcaaggctgcgccaccagactgcctgtcggtgtccaggagcgcgttgatctcgtccctgttctcgtgcataccctcctcggtttcttctcctgctccaacatcagtcacgttagtctcgttgctaccttggagctccgtcacgggatctaacggaggtctcttgcgtgaggggtacggtggagggaattccaaaattggagccaacgcgaccgaatcggcggtaagatgcccagcgtcaggtgggtggagatcgccggcacaactttcagtgtcgaatttccatgcaggattatgccaatggcagtggcaccagggattaaccttgtcccccatggacagattattacacaactacctgagaataccaagaagaaactgagcgttagtaatgccaacatcagatagaaacagctagtagcagcgacacgagtgaaagcagaaagttcagatgaacgggggtagttacgttctcccacttcagttacctggcaattttgcagcggctggactggaagcgagcagtaactctcactgcgaatccgttctcatgcttagttaaacacgtggaatctcgtctgagcagctgctctccacaccattagtactccacaatcctactgtatgaatcagtggaggcgtgcaaaggaaggtctcctccggtacccacggggatgacctacagaatcacacggcagtaaaggttgaaggagaccagacccccctgcggaacacatcaaccgaaagaccgagccaccgcatcctgccagagtgccagggcacttgacgagcacagactgtgctaagtcttcacttctcaacagagttacctgcgcgaatcgatagaaccaagttcttgatgagttttcctgattatacggaaggaaggaaggaaggacgcagcgattcttccatacggaactcaagtgtgctagctggtatcagatttacgctctgcaatccgttagactactgctagctgtctactaatctactgcacatgtgagccgctgagaacgaaatgaggctaaccaactggaatttagtgtgcagtcagtcaattcagggtcaaattggcaggcagctccaagatccgggtgagcttagcgcggaattcgattgcgcaggcctttttaaacccttgcagtagtagcacaacgaaaagggttaactaagagcgaaatctaaaaaaatggtggcgcaacgctcccaaatgagcccaaaaaatcagttactaccaagccttgaaatgagcagaactcaccagatcgaaccctccgagcgaagaaggagaagacggtggacggagaagaaggaagagagcacggggccgcgactgcgaggcggagcgtgcggcgtgctcgcctcggagtcgggggagggccgaggagtggaggcgtgccgcgtctccgcgggtgtggcgtggccgcgcgtgctggctggtgagcctgccctgctctgttcacgagaaagaaggacgggaagggcggctgcggcctgcgggagggcagggctgtggacaggactcttatgggcggccgctgacggaaatgcccctgcggcgtgctggtattttcgcgcgtgcgctgtccgagtcatcaagcctgcttgcccggtggcttgtgcctctagaggccacccggccccgcgactactgctagttgttgtcgcgcaaaaattcgaggacagccagaataccacaaacgggcacgtcgtgcgcgtggaggtaaggctatcggcactcctcatacttttaatttctactctagattttttttaacttagtcatcaaaattttaaaatacagtaaccaaattcccgcgtccacaactactctatatcttaactctatacaaactaccacattttatcaatatatatctaaaataaattcctctagccccatcatctatctccttcgcttttgtcctagctacgaaaagtgaaagatagagagtgatagagtagaactaaatagactctgcatttgaggttggggagtaccaattgaataaagcagtagaacatgtagtatatgagtgcagctatgtttactctaaaatgctattagagttggttttacagtacacgagtgcggataacctaagggtcccacgtggtcgtgttcgctaaccagttcacatagaacaaggtaacaatcacacacgattgaactaccttaattggacttcaaatgggaccctctattaattttcgaactaccttaactggttttatataaattggggtggttccaaacataacagtttataacctagtttgtagaaattagattctcaatttcttaaaaaacaagaagctggcctctcctaacgaaaagatgaaaactgattttcttaaaaactgggttgcttctaaataggactttaaaaatattgtctgtagagatatcggtgtgatctttagaaccggctatttgagaacatgttttttttatagatttagacacatgttacccagcggagtcgtcaaaaagtgtgttggctccgatttggacgccaatcactgaagatgaaccacatagcggtgctctccgcgtgagcgtggacgacctgcgacctcagcataggagctgttccttctcgatctgcacgcttccggacggtccgtacctaaggttcagacggtccgctactggcgcagagatcttgctcctcgcatggaacctagatctcgcctccatggagggaccagtcggggggggggggggagaaatcgtaggtgtgccttgtcgtccgctactggcgcagagatcttgctcctcgcatggaacctagatctcgcctccatggagggaccagtcgggggggggggggggagaaatcctaggtgtgccttgtcgtcggcatgccacccaagacgtctctagacgacgtcgggccgaagagaggtgaagtaatagatagagaagggctaatactagaggtagactaaggttatttactcctactcctaaggaaggtgaagaacagtgcaaatatggtaaatatgaataatatattgaatcctactcctaaggaaggtgaagaacagtgcaaatatggtaaatatgaataatatatttaattggatctattgtggggtttcaattggttgtacccttcatctatagaaatgtgaaagtttagatccgttataagtcgattctagagcttatgcggtggatttttgttaacaaatcccaaaaaaaaaaatctaaaatcttaactaattctgtgcatgtgtagatgatccatgccgccacgtgaccgtcgggcgtacagtctgcacttaccaaaaacggggcctaggtttggtagtgccactagctataggtttggtagtgctatcgtaggatacgcatgctgcatgcatggctcgaagtcggagggaagttctttgtgggctagggagcacgagcacccaaaccatcccgcacgcggcacgcgcaatggataatgttgacggagtttgcaatactcgcaaacatgatgtaataaacgacctgcccttttgtacgtggcaagtcaccttccagctccgatgcacgtacatgcgtatggtgcggggattggaatctataattgtggagcagcctctgttaattatatattgatattgtcattttacttaatcacaacgtattgttttccataataaatatcaggccagagaaaaaaatctagtgccaactctttttttttccaaaagaatgtgatatattactaatcccttgtattaggaacagtggtacaaattttgcacccccatctatcctatccagctatctctcgtagagatgaaaactgatacatatttagatatcaatttttttaattttttttctttaattgtgaataaatatgatatagaatgtgctatgcaaattcatcttcttatttgtaaagattcataaaagataaaactcaaatttatcatatatcttctcaaatgatagatatataatttagatatggatacaaatatctgttcaacttttttttattgtagagagcaaataatgtataaaacaatttatgaaaaaaatattattatttgcaataatatgcttgataatataagaaaagattaacataaatttttttatatatatctattttaaaatattaattttatcttattaagtcgaatcactacaccaagatagtgaactttttatagtctaaaccctaataagttagctctaaactctaggcctgtcgccactaggcacgagccctattgttgacccaaattatcaccataggtccaagtcgctggaacgacctaaaactgagaaagagaaagggctcaccctagggcgattgtgtgtgtgcgaacgtgcgagagagcgagtgagagcatgtgcagagcaatgtcatttgatttcaggaagtcttcctactgttaatgaatgtaacccaaacaattgatgaatacagagatattttattttgttaattaggtaaccacttgttgaagttaattttacgttaaagtgcagttattgtgttcaaatgaagtgtgtcatcatctatgcatttatacgatttaaatatgttagctagtataaatatttttagtgccctacacttagataaaccttaatggctccgccagtgttttcactcctagtccgacgggcactcagtaaagagcgagcctttgccgagtgccacctaatactcttggcaaaaagactagcaaaggagcccagcccacatagagctagtagacattcggcaaagagtgagccttttgccgagcgtcaccgtggcactcggcacaatgtccatcgtcgtcaacttgcaccgtgacgatgacttttctttgtcgagtaccgagtgacactcgataaagtctttgttgcgtattcgacaaaaagtactccataaagaatgtgttgtcgatgtattgttcattaagatttttttgccgagtgtcacactcgacaaagatttcgtcgagtgttttccatgctttaccaggaggtgttttcggtagtacggcggagatacactgcagcagccgggcaattagccacatgacggtgatgctactgctgccgcgccgccgcctgtgagagtgtgaggctgtgactgtgacttgtgaggaccgctgaattccgaagcagctgagctggtagtagcatgcatgtgtccatgtcaattacatgcatgctgtgcagcagctgcaatgcgcttctgtccaccgcgcgctggctggctgctctgaggctctgacctctgaccacgcacgcaagtgatccaagcgagcatgccaactttgcgctgccacgcccacgcggccggggaccgaccgggcaaaataaagggccacgaataataaaagtggcacgcctttggcatccgttgctcgatgtatcggcgacgttcacgaacgacacagattttaaagctaccactggcgccagcgccacagcagcagtagctgcagttcacgacagcgatcgtactcacgtctatatataggtcaaagctgggtcgacagcggtacgagtactggtgtgcgtacgcatgcgtctcgctctgctcccccccccccccatgcacactgtacagtacagacaaaaggagcacgtggtccaatgtgctggcatggcatggcatcgtgattcgtgcggtacttgcacgcgtatcccaaccctaaaaacctgcgtatttcgcctgctagagcaagctcacagtcacagccgactttatgacactcacgtatagccactagaagtttagggcgtgtttggtgtggcgcctaagccgtcataccgcgccacacttttcagccataagtatggcggctaaattggtcaccacacttgtgactgaaaagtgtggcacgttgtagcggcttaggcgccacaccaaacacgcccttagtattaatgtattatactaaaatcaagtttaataatatagactgctggctatagaaaattttggtgtcgattctatagttgatatatattagttagctcttcacaattaattaatacatgatccgcttgtctctaacaattttttttgattcccgtatataagctggctgttagtttatagcattaggccggttatggccagttattatacttgctctaccgattttccctacaagttgtacatttaatatctaactcattctttctcttacaaattgtcttaggccccgttagtttccctttattttgaggaattggaatctaaccaatggagcatccagcatatcacagccgctcccagtagaaacacagtttttatcccaatcttgaagccatggagccaatctccaaacatattgttcacattttgtggttgattaattccagtggaaaacctaaacacactccaaactgaccgtgctaaccgacactcgaaaaggagatggttaatggtttcctccttgcagtggcggaggacggataaaaatttaggtatggctctacatcgtataatatttagtacacaactaattaaattataaaataaaaatgtacaacatatatatatatataagtaaaacattgtctaaatgagaataaattagtaagaaacacgacctatatggaactcattggttatacctttatcattggcatcttcttcacattgaacctcttcatcgtcctctaactgagatccaatagcttcctccactattggtggattgtcctcctggccaactccactcccataaatacatgtgtttgtgcaactagatgtccgactaaaataactattcaaatctacgagtttgtgattttcttttgtttcttctccatatcatcttaaattgtgctaaccttgtgtttctatggttgatctattaaattttgttttcatatgtaggtatggcttgggctatacctagctataatggctcctccgcccctgcctccttgtgacaaaaaacacatataagacttccctgccaattttgcttaaccagattatcttttgtaaggattaccccccttcgcagataccacaggaagattttaaatttcagaggtgcctttatcttccagatatctttgttcagattagggatatttctgagcatcagggccgcgtagtgtgatttaactgagaatctaccattagaggcaaaactccagaaggagtccgtgtcatgggacaactccataccttggatacgtgacaataaagatagccattcagccaagctggctccaaataattttcttcgccagggaaagacaggagggaatgcactcattgcttctgctatagttatgcatttatgtctcacaatgttatacagacttggatattggtctcttaacgaggacccatcgagccatgtatcctcccataaccttacatgtgatctgttttttatgagaaaggaaccatagcgaaaaaggctagctttactttcattaagcccgactagaaatgggaatccccaagtttccactcaacctgagacaaaggttttgagcctacatatttattgcggagaagttgttgccacattccatcagaggtgagtagtttgtacatccatttactaaggagggcagtattcatcgtattcaactctaggattccaagtcccccttgatccttaggttgacacagaatatcccatttgacaagtctatatttccttttgttatcattcccctgccaaaagaatcttgagcggaaatagtcgagcttccttcggactcctttaggaagtgggaagaaggacatcatatacatcggtaagctactaagtcctccaatagacaggtgtttttctttccagctgctaaggctcttttcaaagcgctcttcaactttagcccaatccctaattcttaattttttgaaatggattgggataccaaggtagctgatgggaagtttccctggcttacatccaaagagttttgtgtattattctcactacaccaaaatacttaacttccgagggcctaaaccgtaggaagttagcgcaaaactctcggaagttagttaaaccgtcggaagttagccgaaaccgtcggaagttagcccgtcggaacaaattagtcggaagttaggctaacttccgacggactctcggaagttaaagaaacttccgagagggacgtctgcctctcggaagttaatgattaactttcgagggggcgtccgcctctcggaagttaggtgctgacgtcgtccagcacgggctaacgccgtccgtgggataacttctaacggcctctcggaagttaaccactaacttccgagagttttccacgcctctcggaagttaaattgaccagcacttaatgtacaatttgtttttggcaattcaacacattgcatactgaaagtcgcctagagggggggtgaataggcggaacctgaatattaaaactttatcccccaactagatcccttgattagtggttagaacaagatatacaaatatcggagaatagaaactaagttcttgcttgaaaggagtattgctaaataatgcgggagagataaatcaatacaactaataagttatagaataacaaagcaagaacccttagatgagaagagcactaggacaagttctttcttgcaacgtgttgcttcactaaatgggaatttaactcgaagcaacaccaaatgatattagcaaagaatggtgcaagagaacttagagtaagggaaagcaaacaaatcacaagcaaaagcacaatgaacacgggtgatttgttttaccgaggttcggccctcgaaggcctagtccccgttgaggagtccacttaaggacgggtctttttcaaccctttccctctctcccccgatcacacaaggatcggcgagctcttcttcttctcaaggatcactctcgatcccacaaggaccaccacaatctttggtgtctcttgctagcttttacaagcctccaacactttggaggaagttcgaatgggagtcaaaactccacgcacaaatgaacacaaagatgaagcacacactatctctcgatgaatctcacaaggcactagtgctaaactcaaatgagtagctctcttttgcttgctctctcttttgtggcacttgtgttggttgtagtggtctaaatcttgtgtataggatggatcaatgaatatatgtggttgggagggcttgagtatgtcaactagatgacttggaatgttgcttgggctcccacaccttgaagtggccggatggggtggtatttatagccaccatccaattttgtagccgttggagaagctgctggcgatgggcgcaccggacagtccggtgcacaccggacatgtccggtgcgccagccacgtcatcctatccattgagattggagctggtcgaccgttggaggctttgtcctcatgtggcaccggacagtccggtgcagcaccggacagtccgatgcctctctgacttctgctctgacactctgaattcaactgtacacttttgcagagtcgaccgttgcacgcagatgaccgttgctccgctggcacaccggacagtccggtgtacaccggacagtccggtgtacaccggacagtccggtgaattttagcggagcgacctcccactttcccgaagctggccagttcagagccgcttcactctggagcaccggacactgtccggtggtgcaccggacagtccggtgaattatagtgggctgcgcctgagaaacccgaaggtgaagagtttgaaggcaatcttccctggtgcaccggacactgtccggtggcacaccggacagtccggtgcgcccgaccagggagcacttcggtttctttttgctcctttcttttgacccttgtcttgttctttttattggttttatgttgaatctttgacacctgtagaatatatgatctagagcaaactagttagttcaattagttgtgttggtcattcaaccaccaaaatcatttaggaaaaggtttaaagcctatttccctttcacatacataacaaatatatataacagccacaaatatatataacagccacaatacacaacatatcacatataacatctcacatacataataataacacaagacacaagtcaaatccacctcgacataagaattcacaagtctcacaagacataagtttgaagtctcacaaaacacatcgaatggaagcccactactgtcgatcaacatcaggaaatatcgaagagtgatgctcgctacctccactcgcgaagagcgtattgacaaagtctaacccatcatcttgttgctgcgccggcaaggtagctggaggagtctcatatacctatacaaatgacattcacggagttacatcgtaatgtaacaagtaaattatgataaatttgcatacctgatgtttggtaggtggaggtggaggtgaaggccaaggaaaatgtatggaaggtggaggtgggggggccatcggaaacagtatcccttgggcttgtgctagttgctaccaaatttccgaacacattaatgtcagtgttttaaatcaatacataacttaaaatgaatgatctttttgaacttacttgtatcagtgcttgctgttgttgaaactgagtagcataatattcttgttgagcagcatgttgcctcaagtattcctcctgaatcctttgtcgctcctgatgttgcctaagctcttctcgtagttgctcaacttctgcagtatcctgagtagagcgatgggagctacgagcagcagacctcgacgaacctcccctctgaaccgtcacctggctcgagtcgatgacgttatcgaaaatcgagtaccttcaaacaagtaacatcacgacagattcaaaaataatctattgtacttaaaccgatgaaacaagataaggtatgtagagtccacaccttccatggggttttccaccacttgcatacacagcctgaggatcaataggtgcggtcctccagtcgtagtccgatccgtgctgactagacatcgcctcagcatatgcaacctccatacaaaagaacaatgcaatcttacatcactgggcacatacataaattcatatgaacaaaatctaccaagcatttcaaaacactcaccagacgatctgttgccttttgactacacaacacatctggatttgcaggatctggtcctctgtgccccctcagatatatttgaacatcactgggcactacaccactgctagcttcctgtacgtacatttgacaaacattataatcagaaatgacatcaagtcatatacaatcaacaaaactacaccactgctagtttcctgtacttaccattcgttttgccaaacgaaagtgatcatcacctccatacttgtgatacgactcggttccacgattggaactttgtcgtatagactttgccttgaaattatccgaagcccaataacggcataaggcacgccaagcagcatcattggcggctatccatggaatcgaatgctatggaaacacaattcatgtataagtaactataacatatacaaggaacacagtacatcatatgcaaaaacatcaattttttccaacataagcaaaaacatcaattacctgaagaaaatcttgctcagtcatagaaagtccatattgtgacgcctcgctcttactggttgctcgtcgtccttcactactcaacatagcttgattaatcacctggattcgaacatagtacatcatatccgcaacaacatctgtcgcgttcttatggaacacgtagtgtgcatgctcggtatgagtatctccatcaggcaacttataatatttctgaaaaagaaacatagtcaagaatccataatatgaatcaatcattgagctgataacttcgcaagaagatagataaacatacccagaagtcgtgccaaactgcgccttgcgcattcccatgttgcgcgttaaccgcaaggccgtattgatcccatcttgtgacagggacctcaataccattctcaatcaccaatccaggccatctcatacgacagatattgcccaacactttatttacttgccttacacgatctttgccggtgaaactactatccagccaagccctaacaacacaagcacaattgtcaaattcaaaaataattatttatcatcaatgtgtaagacataagaacaaagcaaatatgctcttacccatctccactcgggattatctcaaccttgttaactggttctttaggaggggggacccaactagtcttctgcggcttccggacccgtgaagaccctccaactcccccgcttccagaacctccacctgaaacactagcttctccttcccttgacccactagctcccccaactcccgaccctccatcattgggccattcaccccaccctgtctcttcctcatcttccacttgtctccactcctctgtctcttcctcatcttcaggctcatcctatagatcaaaattgataatttagttattcgaactcatacaaatattacattacaaaacaaatatattggttacctcattcctctgtacgccgactgcctgaccctgcaactctggaacatgctccaacaaagctctacgcctgctcgagcttgaactagtgccctggaacactaagtcctcctttctcccaaaaatggaggctctcctcgctagtcccttagcgagctgcttgacctttttagacatcctgttattaaaacaaaatcaaattagtaattgagcctcactagcaaattctggatcaaagtcatctagagccttccacgcatcactgtcagacgggtgtgtgaaaccatctgtcgccaacccaattcgaatatttctcgcttcactagcaaattctggatcaaagtcatctagagccttccacgcatcactgtcagacgggtgcgtcatcacatgagtgtcccctcgttcacgttctttatgccatctcatgtgcctagctgtgttcctcgaaagaaacaaacgcttaacacgaggcgcaagaggcatataacgtagttgctttggggctacagttgatatgaccatttcaccatcatcgtttttaacctctacatatctcgacttgccacactttagacacttactatcattctcatgatccttccagaacagcatacaattatctggacagacatcgattttctgatagtccatacctagacctgagagcagtttcctgcactgatacacgtctttcggcatcttgtgatttggtggaaacacttcactgattaagttcaagagctcgttgtaacaattgttcgagaacacgaacttggacttgatagccataagtcgagtcacgaaagcgaggattgaaactgttgtgtgttcatgcaatggctcttctgcagccttaaggaggtcgaagaactttttaacctctggaggaggcggctcctcatgatttggtggaaacaccaaatcaggatcctcccttaaatcttcaagcatctcgtccattctatcgtactccacgtcgtcagtgttgttggcttccggcaaattttcacggggaaagtcctcgccgtgatacacccatacttcatagttaggcatgtagccatatttgcaaaggtgccccgacagagttctcttgtcttgacatctacaaatccgacacatactacatggacaacgcacatccgtgccagttcttgatatagcaaaagcacgatcaataaaatcctctgtctttcttatccaatctgctgagggatcattcatacgccaaccttcatacatccatcgacggtcctcgcccaccatatttgattctaaaatagtagaacacatgattcataaattttttccggtactaaacgcatatcgatcgtgtcactacatctataggaaaagatagttcctaaacccacccatgagtgaccggtagagcaatgatttatgacgagcaacgagtccgaacgaaatttcagcagcataaccccgttgttctccatttacatgcccataaatggtgcaatagagaacaacagggttatgtcaccgaaatctcgttcggacccgtcatcgtcataaatccatagctctatcatccactaacaggctgtccaaaaagggacaatttcggaccaatacgagtcatatgtgtatatatcatgtgactcgtgtctatccggaatgggcgacacataggtttcacaacactacgacaattttgcaaaaaatattactaacacacaacaaacaagagactaacataattcaattacatgcaccatcttgcttattaagttaattaaccgtattaacataactttctacggtttaaaaacagttaactctcggaagttagcatatttaatataaaaacataatataaatactcggaagtagttacctgaagcgacgacggtgactggcggagccgggctgggcaagtagcgggcggggcggaacggagacaacgggatgtggggcggctgagcacccggcgacggggaggcggccgagcagacgggcacgccggcggacgagcagacgacggtggagcgagcgggcgccggccgagcaggcgggcgcgcggcgagccgccggcgggcggcggtggagcgtgcaggcaggcgcgcggcgagcaggcggtggtggaggcgccggatcgcgcggagagcaagccgggcaagcgcggcggcgcgttccggcgagcaggcgggcgcgcggcggcgagcaggcggcggtggcacgcgggggcgagttccggcgaggcggcggtggagcgagcgggcgccggccgagcaggcgggcgcacggagagcaggcgggcggtggcgcgcggcggcgagcagacgggcgcgcggcggcgagcagcggcggtggcgagcaggcggcggtggtgcgcggcggcgagcaggcgggcgcgcggcggcgagcaggcgagcaggcgcggcggcgagacggggaggcggctgagcacccggggaggcggcgagcaggcgcggcgcggcggcgagacggggaggcggcgagcaggcgtggcgcgcggcggcgagcaggcgcggcggcgagacggcgtagcgcgcgggcgatccaaaatgtgagacggacgcgcgccgttagcctaaaatagataacttccgagaggcgctgcaaaaccgtcggaagttaaggcatacccggatcggtcaacgtctgaatacgtaccttccgagaggcgacggaccagccgtcgaaagttatgttaacttccgagaggccgtcggaagttaacataacttccgagaggctcttggccggccgtcggaagttaacataactttcgagaggcactagtcgccactcggaaattattaatttcctacggttttgaaaaaaaaccgtaggaagttatttgcctctcggaagttgcttattttggtgtagtgtctaatttctcttgggcagccccgaaacaaaaaatctcactcttatggaaattgatctttaaacctgaggcttattcaaatgcaaatagcaacaacttcaaattgcacgcttttgtctatgtcgtagtccataaagagtatagtgtcatctgtatattggagtattgagagtccaccatcgacaaggtgcggaattagtccctcgaactgttcatccagtttagccctaccgatgagaacttttagcaaatccattattatattgaataatatcgaggacaaagggtctcctgtctgagccctttttttgtttggaagtagtatccaacattatcattgacatttaccgctacactcccccctattctctctttatttctatttcttctacatgatatgacatctattgtacagcccacctacgttaccttattatacactagcggtagtaaagccacgagcacgccggcggtgcagccgaatcttaagaacctctaaagcacaagatttgggcactaatagtttattcccccaccccactccacacacaccgtcattacattggcactctttattgccaacttttccactttattacccctctctctcacacagagagaaaaagagagatgcatgattagccggaagaggattaaaggtacctgcaggctaaagcaagcgtgtggttggccacttttaactaatggacggattgattattcctagtacgtctgttgttgttgagactgtataagagtagtcgagctgaagctaccagctgtagctatagggaaacacaacagattagaggcacgcacgcaggcgtcaatccgtgggccaggcatgcacgcacagctccacccttttggtttggttcgctaatgctgactgcatattactttaattagcttgcttaatctgctgcgcaaagggaaaaaaaggcatgtcatcgtcgttagtatatgtatagctttgttaaagcccgcatgcagctaagctagtagcgttgtgattgcatgcacccgccccacgcgcagactcttctaatccgtctcacgacagtgtaaaacgttgttttgtaatatagaatgtattgactttaaaattgggagtgagataaaaggtaggatatagaggctgctaaagatagcctaaggttgtcctgaccgacacggacccacgccggcggtccgtaccgaccaaatcggttcaaacatctatttgttctgccaatcatttgatgggtctgttgaacggtcgacacggttgataccaaccatgttcaagctaaacaggtctttaccgatccacgcgctagagaaccgatcagtattgattgccacgtgtcgtttcctgattgcttcatgttgttttggccatttgaagtttataaaattcaaaagaattcttagatccatcctatgaatacagtggggatgtttgagtttatcctcactcatactctccaatttgttcaacttcttccatattgtagcctctcactctctatttcattgtataccctaggtggagttcgaacattaaaaccttcgccgacttcctcaatgagtaatttctacaacgcctcgagacctctgccgatgtgaagcatgtcttcttcgatggattttctcctatacgtcatcgtcaggaggaggtttcttcccatttctattcctcgagtttgcaacctctatatttccatagctatatcctccttctttgtataattatcgaccatccatggatgctccacctcctcccaattaaaatcctatcaccaacgctcctaccactgacactcttccttcctcaacctttcatggatcaaacagtaaaccgttaccgaagttgtcggcgtttcgaccccggggggtccctggaccgacgagtaaattgtcgctgcgtgtcccagcccagatgggtcggcgcgagacggaacacaaggggggaaacagtaaggggaaaccgcggcctcgtgttgtcctgcgcccagggcggatgcgcttgcagtagggggttacaagcgttcgcgagggagagagagagagagagactgtccgccagcccgttctcccgcgcggccaccttctcgtacgagagccctggaccttccttttatagatgtaaggagagggcccaggtgtacaatggggggtgtagcaatgtgctaacgtgtctagcaaaggggagccagagccctatgtacatgtcgtcgtggctgttggagaggtgttgctgccctgttcatgtgatgtcgtggccgtcggaggagcgcttgagccctgtggaagcacagctgtcggggctattggatccttgctgacgtctccttgcttccgtaaggggctgagaatcgccgtcgtcatcgagcacgcggggtgccatcattacttgttttaccgggggagccagatgggacgccggtcttgttccccatagcctgagctagctagcggtagggtaatgatggccccccctgtgacgtggtcggtccgagcccgaggtcgggcgaggtggtgactcctccgaggtcgaggctgagtccgagccctggggtcgggtgaggcggagaccgccttcccgagttgaggctgagtccgagccctggggtcgggcgaggcggagaccgtcttcccgagttgaggctgagtccgagccctggggtcgggcgaggcggagaccgtcttccgaggtcgaggttgagtccaagccctggggtcgggcgaggcggagaccgtcttccagagtcgaggctgagtccgagccctggggtcgggcgaggcggagaccgtcttccggagtcgaggctaagtccgagctcaagggtcgggcgaggcggagaccgtcttccggagtcaaggctgagtccgagccctggggtcgggcgaggcggagaccgtcttccggagtcgaggctgagtccgagccctggggtcgggcgaggcagagcttcctatggcgcccgaggctggacttagctgctgtcggcctcactctggcgagtggcacaatagtcggagcagggcaggcggcgctgttttcctgtcaggtcagtcagtggagcggcgaagtgactgcggtcactttggctctgttgactgaaagggcgcgcgtcaggataaggtgtcaagcgatccttgcattgaatgctcctgcgatacggtcggttggcgtggcgatctggtcaaagttgcttctccgtgaagcctgcccgagctgggcctcgggcgagttgaaggtgcgtccgttgtttgaggagaccctcgggcgaggtgtgaatctgacttggtctagtgttcctgcccgaggttgggctcgggcgagacgagatcgtgtcccttgagtggatagagccttgtccggaatcgcgcccatcaggcctttgcagctttgtgctgatgggggttaccaactaagattaggagtcttgggggtacccctaattatggtacccgacagtagcccccgagcctcgaagggagtgttagtactcgcttggaggcttttgtcgcacttttttgcaaggggaccggcctttctcggttgcatttcgttccggtgggtgcgcacgagcgcacccgccgggtgtagcccccgaggcctcggaggagtggttcgactccttcgaggtcttaatgcctttcgtgatgcctcggccggtctggttgtcccctcatgcgaactggccgtagcccgggtgcatagtcaggttccgagttctcgggctggtatgttggcgctgtcaacggtttggccggagccgggtttgcgagagcagcccccgagcctccgcacagagcgagaggatggtcaaggactgactcggcttttttcatacgcccttgcatcgcctttccgcaaggaggaggggggaaagcgccatgttgccctcggagggcgccgaacatggtgtctcgagtgagttgctaacgggtgatccgagtggacgcccgtgccccgttcgataagggtcggctagtggcccagaggcgcgctccaaaagtacctgtaggtgatttgtcggacccggtcccgtttgatagggtccgagggctcgatgcctccctctgatgggattccgttacagaatcactcctgctggtctcagaaatgtcctagggtacctcgggagcgtagcccgagcctcggccatgtatcggacgtaccctgagtcatccctcgctctgcgtgctctgaggcggctgtcgaacccttcgggggccagcctacgaacccctgatcagtagtgggcgcggagcccgagtggcctgaggcggctgtcgaacccttccgaggggccagccttcgaacctctgaccagtagtgggcgcggagcccgagtgctctgaggcggctattgaacccttctgaggggccagccttcgaacctctgatcagtaggagggctcggggcccgcttccttcgcggagaaggatccctttcggagtatcccctttcccagtccctgtagcaagagagagaaaggggaagagaaaaagggatatgaaattgaacaacgtggcgtaccttttttgacgcggtcatcatggtgggggtgaagcgtcgcccgcttcgcctgccaaaggtgtcgcctgccctgccgcagagttaatgcgacgggacgagtggttcgcggggcagctgttgtgcgtgcgcgagccgttcgaggaacgggtgtttcgcctttgagttttgaatttcacggcgggtttgggcgaagtgttgaatgggtctcgcccgggcctttatatattcggaagaggggccggtggtggttctttactctgctgctcgcccctcgcttaggtttccgcaacctgagggaataaccagagaaagaaaactgcacaccttgtccgctccgccgccgcctccttcgcttggtgatggccgatcgggtaaccgtcgttccgtcgcacgacccgtggcctttctctaccgtcacggaggacgatctggaggcccttgttgccgatggtttgcttcgtcccctctccggtgacccgcagccggagtggatggcccctccgagcggagccgccccgtccctgccgtcggggtacgtgctgagtttcgtctctttccatgagcgggggttcggagtgccagcaagtcgtttcatgcgggtgattctgcatttctatggggtggagctgcacaatctcaaccccaactccatcgcgcaagcagccatcttcgcggcggtttgcgaagggtttttggggattgacccccactgggatctatggacccatctcttctccgtggagccttttgccttggcgacaggggagaggagagttcgcatggcggtgcaggccggtggatgcatcctccagttgaggcaggcgcatgcacagcagtacatccctgtcatccttgtgtcttcgaacaaggggtggcagcgctggtggttttatctctggaatgacgatgggaggctcccgtcgttttctcaatgagtggtgaccgccgccggcaccaactggcgctatggggccccgcgcgagagacagaagaatctccagccccttctggaggccttgcaggagctgcgagatggagggctcaccaccgcgggggtggttgccgccatccatcgccggagggtgctccccttgacggagtgacggctgcttctttcggagatggcgccgggggttgacttggagggttcgcagatgtcctcggtccccctccccgccgatgacctccacaggagggtagccggcacggtagggaggctggatgtcagcgtccttacgcagccctcgatgcgtcccgagtgcgggtgcatatgcctggtgagtgtccgctccttcttccttcttatgtcggattgcccttggttctcacagccgagacttttcgtccgtctccaggaggtggggttccacaagccttccttaccgccgatcccggaggacgcggtggaccgagccacgctgagggttgccgcggagaagaagaaggagaagaaggacgtgaagaaggctcgggcccgcgagcggatgcgggctcgggacgccttggagaggcgtcatcgtcgacaggagagggacgggctcccgagggagccgtcgccggagacgcccgatgatgatgatgacaacgacgatgacgatgatgaagatgatgacatggctgcccgcctcggcctcagcccggatctgaggctgggccaggggtcgtcgagccagcccccgtgtgggctggcgccgtcggtatccggggccgggacgtcggggtcccggtccaaagaacgggggcaggctgagggggtacttgaccccttggccgaggtagttgaggtgaccctggggagtcaggtcgacccgcccgctccccaagagccgctgcccgtgccgactgcacaggaggctgatcctcatgtcgttgtgtctgcgtctgggcagaccgtccttctggcgccttgggcgcccgaggcagggacggtgccgaagccggcagcggggcgaaccttggtggtacccgcggggaccgaggctcgaggagcctccccgaaggcacgattggtcgtggcccggagtgggtaagtatctgaggatacctctgtcccggctccttcttcatgtatcctgattctgctcttccctttcttctcagcaaacggaggcacggttcgactggtctggctccccggaaggcccttaagaccgcaccaacttctgcagctcgtgccgcaccgggcctcgccgaccggccggccgctacataaggtgcccccaagcagggggctcaggcggcacaagttgtcgtggggcgagttcctgaggctgacccctccatcgaggcggccgtcgtgccgagggaggctgttggcgcgaccgcggcctctagcccaccgggcgggttgccggtgctggcaccggcttctgccgaggctgttgccgttctggccgtggagtcacccgtcaccgccgatgttgagatggccaaggcgccgccactcgaggtcggcgatcgggaacctgcccccttggccgaggaggtacccgatgcgctggctgcaggaggtgccgacgccttggaggagggaggtgcagaaccgcggcccatcttggggagcggcgacctctcctcgcgcggcgaggtcccaatgagcggcgtggggagaggctccggttctggacccgtggtgcttcggaacccctcctcgttcttgacgatgagcgagaggagcagacttgggacgagcttcgcgagtgtgccgaggcgacggtggggtcgctttggtcgaccctggaggtcctttccaaggacgttcccaggatcctccaggtaaggattccaggcatacctttcatgagatcaagacattctttgtgacgccccgcttcccttcctcaggatctgacggatctgagcaccgccaagtcgtcgttcatccgccgcgaggccgacgtctggggttcgctgtggttcctgaggaccacgcttgccgagaccactgagcgcctctcccaacggagcgccgaggcggcagaccttcggttgctctgtgacgagctgggggcagaggcagtggcggcagttggagcttggccaggtcatcggtgagcgggaccaatctcggggccgggccgccgaggccaaaagtcgggctgaggcccttggaggccagctgttgggcctatgcttcgtcgccgaaggtcttctaggaagaagcggctttcggctgaagctgtttgtataagatggccgaaggttcctcttcataaagcttcggtattacaaaccgacctaaagatagaatgaccttttagtccataaaggtctgagtcaatgttgtaaacttttataaggggcatacttgtaattcctcacaggctgcgccctgtgcctataaatagtgaacagtattcctttactgttcaggcattcgctttttgcgtcacgcttgtactatcatctccttccagttgaaggtacacttgtaattcaatgatattcctgtttatgcctaataataatagataattgtttatgttgtcttttatattccttacatttcatccttcgtcactgtatgatgaatttatggaaatacgtccttcataaccttcgtccagaaaccattatatcctaaaggaaataatgcttcgaaggacgaagggctttaacgattaacattttctatgttgccttgttcttaactcatagcatttgagaacaagtccccaacattggcgcccacctccggtgaactcacttccacttttttgagctgatggcttcgttcaacgatcaagctggagctgcttcggacccgaagctggtgctcccgatcacaggtggctcgtcctcagagccagctaacaagaaacaaaagaaggaagcacagagaagggtacaacatgttggggtgcaaggacccttcatcaagtcaagatggtctcacattcctattaccttctcccaagaggaccttcagctcaaggattacccacacaacgatgccatggttatttcttgtgttatcaaagtgttgggggccttcggcttccgaaggtcctcaaaaacatgatttaacagtgtttctagagtgtaatgtgtgaacaggtatcttcggactcgtatcagagagggagaagctcaaaagatacgaaggttgacacagcgccgaagctgtgaagcaggaaagcttcggcatgttcgcagaaaagggaaccgacttgaagatgaaaaggccatttagacctcgatagattactatagaattaccaccaaatgtaaagggcatgtatgtaattttgtatgggttgtaccccgtgcctataaataggtgaacagtacccccgtactgttcacgctgatttggtgttcacctttgcgtcacgcttgtactttcatttccttcaaattggaggtacatctgtaattcaatgttatttttatataataatgatatatgatgatctacgtaattctttatgtttcttgtaattcattcttcgtcaatatgtaatgcatttataaatgttcaccctttgtgaccttcgtccgaaaatcattatatcccaagggaaataatgcttcgtaggacgaaggacttaaccgattaacattttctatgttgccttgttcttgaagcatttgagaacaagtccccaacattggcgcccacctccggtgaattcacttccactctttgaagttttttatcttcggcgatcataaaccttcgttatggcaccgaagaaagcttcagcacctgggactgcagctctacaaccgctggaccacaatcaggagacagtctctcttcgggaagcccgaagccagaaaaggaaggctgttagcccgtcaccaccagaggacgagttagatcaagaaatcagagatatggaaatgcttcatcaacaagtgcagaggaagaaagaaaagatggccaggctagctgaactacagaggcagatagacgaagcctctgaagaagttcgtcaccttgctcaggatgagcaacaccgaaggcctcagcaccaagaccttcatcaggaggattttcccaacggagatgactggtatgacaatttccatcatgggaattttgtctttgacgatgcttctcctctgtccgctgagctgcaggctacaccttggcctccgtcctacaagcctcctcagcttcccgtatttgatggccactcagacccgaagcagtttttgatgagctacgaggcaacagtatcttcctatggtggcaatgttgcggtcatggccaaatcttttgttatggctgtcagaagtgttgctcaaacctggtattcctcccttcgaccaggaacgatcacttcatggcagaagctgaaggacctcttgttaactagcttccaagggtttcagacgaagccggttactgctcaggctctgttccagtgcacccaggatcacgaagaataccttcaggcgtatgtccgaaggttcttgcgtttgagagcacaggcaccaacggtgcccaatgaaattgtcattgaggccatgatcaaggggcttcggccaggaccgtcagctcagtacttcgccaggaagccccctcaaactttggagaagcttctccagaagatggatgagtacattcgggccgataacgattttcgccaaagaagggaggaggccttcaggttttctgaaatgaccaggggtttcggtgggaggttttacccgaggcatgttggatcaattcataactctacacaaagtgatgataaggggagccaacagcaaaggccacaatattcctcgcaggcttcggggcaacagcaagctcccttccgaccaccagctccaagaggcagaggtgccaggggcttcggaggaagatttggcgatcaacagagaagaatcttttgcttattctgtggtgagaacaagggccatactaccaggatgtgtcatgttaccatccagaagcaaaaggaaatagccgaagccgcagcacaacaagctcagccgaagcaggtcatgcatacagcttcgtatcactcgccctacatcccagagtatgtaggcaaccaccctgcagtttctgttgcttcggcgagtcaatctcaagcttcttggcaacaacctccgcctccacctccgttacagcaaggacagcagccagaagggagccagtatgctccacaccaaagggacttccgagagcagtccgaagctcgtacagtcaacagcaccgtgccagagtcaaagcacatctattgacaaatatcctaccctaatagcaatcttttctatccagttttgttttctgtaataaaggatattgtttaggtttcatataaatactttagttgattcccacaaggaaaatatatttttctcaggcttaaattgttaaagtttaaagacttgtgataatcaagaggaccttcggactaccgaaaattattcgaaacagcaaaaagtcgttctaaggaacgcagagtaagttgccgaagtcacaaaaaagtcgttccaaagggaacgcagtgtaagttttttgctccaaagacgttcctaagggaatgcagagcttacagcgaaaagtcaacgctgattccgccaaaagtaaaggcgaagaagctccaaagacgttcctaagggaatgcagagcttacagcgaaaagtcaacgctgattccgctgaagtaaaaggcgaagaagctcctaagggaggcttataatgaaaaattttgtatgttttgtcacaggaacgcgtgtatcttcggaataaacaacattttactcagcataacatcatcgcatcatttcgcataacataagcatcatacatcatattgcataaagcacaagaaggggatgtgacatcgatcttcggaagaatgttttgaaaagggcaaaccatgctaagtagcttcacattgtcaagaagcctggatattattcatcagaacactggatattgttgtgacaaacaaaaatccttcttcacgaagcatgaaaagaagggaaggtgttttttcgtcaaagactcaaaaagcggtatgtgtaaaagtttcatgcatcgtaaagaattaagcaataaaaagggtatattacattcaggattacaaaatgttacaattcagaagtttactttacaatagtgttcaattttcttttagaacaacttctgcagcttcattcaggagtcgattgacgacttcatccatgattgcttcggccatctttttaatttcatcgtctcctttcggctgagggcctggagacgcttcagcaggatctaaaggacaggacacggctatgctgctattacaaacggaaaacgaagcttaaaaccaaaaattacaacacaatacaaactattagttaatacctaattgaccttcgggctctgtgctcttttcagcagccttagccacttctctagcatcgtgaatgcccttttcacttttttgaataatatctcctgccatttctcggccaccattatcccagatatcagtaaaaaactttccaccaattatgcttgcttcggccgaagggtcttttgcgtcttcaaaggacaaggcagtttcggattgtgctaagatttttacgtgttcacagcccttcttctctagaatggtggcaattcctctggccccagagaaagcacatatatccccacggctatttaaaatttcttcgaaggcttcagcttcgtggtcgatccattcaataggaccttcgggattgcctcttataaagttttcttcactagagaaggcgccgaccctggcgaagctagccttcaacttcttaacacattctatagatttgttatagcacctcttattggatgaacgaagctcttcaacagttgcttccaagtgatccgcccattggtcgctgagctctcgccttgtttcttcaagtatacgttcttccctggctctggccagttgtttccgaagatcttctatttcgcgtctctgagcttcagcctgactcttgaacgcagcttcgtcttcctttattttatttaccaatgagtgtaatattttatctttttcgaggccttcgttcctcagttcaattacttcggaacgaaggttgctcagggctatagtacacccttcgtcttcagcatctttttgtgccctgagggcattactaagtatcaggccctgcaaagaaaagtatgtgtgtttcaataaaacaagcaaaaagttttttttttggtatcaacaaagaatacaaggatcccatttgtcgcacctttaagctattgtaggccaggctgtcggccaaatcgttcttcgacagcactgagagcccgtcttctaaggttgggaatccgaagctcttgctcatctcccggcaaacagaaatttccttgttgtcagggagacaatacaaaaagtcttcttctccactaccattgaatattaacgccccctttggatacttcagcttttgggcgtaatgctgggcctcttgctcctctttttctgaaagttttttccccgaagcatgacgaacaatataatcacgagctctgatggatgcttcgggggcaatgactccgatctcttcaacaaaagttggctttgttattttttcctcagtttccaaggattctatcttcgcgggctctgacgacccagcttcggcttcagtcccttgcactggagttttgttgtcagaaatttcagttgtcgtttcaggaatggtagcagccttcttcggaggtgtgcttgaagttttaattgtttctagtacatctagcacattggccattcttcttctttttggagtcactgctggcactttttgattttttattgtctcaacatttgctgcaggactcacaatttctggtactttttcttcagttggttttttcacttctccaattttttctgtggatggcgcttcggccatttcttttgtttctggcagcgaaaccttcggttcttctagttctatctttttcgccgtttcggtcatccctgcagctgcaggtggtgtgactggtctggttggctttttagcctcggtagccgaagaagatttttcggtaaactccggcaccgaagctggttcgatataccgcggccggtgagtaaggacttttattttctttctttcaggctctggctcgctaggagcagttgcagcttcttcttttgcagaggttgtgttctttcttttctgccttcggacggggtagcaatagtcagggtaaacaaacccaattgcatcaaatacccgattcagccttttcttttttcggcctccgaaggctgctgacatcgcagtatcttcggcctttgaataagtaccaagcaattcgtcacttaaattttcaatactctttagccagtcatcatctggctcagtaaatttatctccaaatttgaaggtgtacttcagtctcacaagcccaccttcgtcggcctcttttatggtttcttgaggcatttcccatttctccgcaagaggccaaacccggaaggcaatatgctcttgtgctaaatctcttgttccaataaaagagcagataacaccgaaggccctctggcattcttcggtagcttcattcatttccaccttcggcctccgaaggccgaagctttgccaaataggacgcataattatacctttgatatcttctcgtgctgataggtcattcttcacataaaaccattctgtcatccaatccccgggccatctcttccgaaaggttggtacgggacagcttgccccggaccgagagacgaaactgtagcagccaaagttattatggtactgttctttgccccaaggctttgtttcatataataattcgtgtatattacagaagcttcttgcatcaggcttcagaccttggcttctcgcggcccacacgaagatatttagccttataattgcctcgggagtaagttgatgaagatagacttcgaaaattttcaacacctccacgacgaagctgctcaagggaaatcgtagcccagctttcagaaagcttcggtatactacgacttcattttcttcagggtgtggacaagtcttctctccttcatcggccctcacaatggacaaatcccgaaaataccttcctctcatgttgacaagatgattctctttgatagttgacttaccataaactgaatggcttggtcgccagggacgatcttcggagtcttcgctaccgctgtccacatcataactgtcactgtcaccagtatcctcagacaagccttccagaatttccttggtaattttttccgtgtttgtcttcgacatcgctataagaaaccccaagtttttctcctcatcaagagtcagcttcgtctcaccagcagttttctttttctcttcatcaagagacagcttcgtctcagcaacagctttcttgtctccagacatcttcggaaatactaaaaaactgttttcaaagccgaagctttaaaattaaagactcagggaatcttagcgcgcaaaagctaaaaatcgagcgagcgagagcaagtgacaagagagcgtaccaaatgagctcgcggtatgctcttatttatacgctcggtgcggtaaaaatggaaagaccccgcctgtcagtgaatgttgctattctagcaaagggaaggtgttttttcggaccttcggcttaaagccttcgtccatgtcgcaatctaaatttattattttaacaaattaatattgcgaggggctactgttgggggccttcggcttccgaaggtcctcaaaaacatgatttaacagtgtttctagagtgtaatgtgtgaacaggtatcttcggactcgtatcagagagggagaagctcaaaagatacgaaggttgacacagcgccgaagctgtgaagcaggaaagcttcggcatgttcgcagaaaagggaaccgacttgaagatgaaaaggccatttagacctcgatagattactatagaattaccaccaaatgtaaagggcatgtttgtaattttgtatgggttgtaccccgtgcctataaataggtgaacagtacccccgtactgttcacgctgatttggtgttcacctttgcgtcacgcttgtactttcatttccttcaaattggaggtacatctgtaattcaatgttatttttatataataatgatatatgatgatctacgtaattctttatgtttcttgtaattcattcttcgtcaatatgtaatgcatttataaatgttcaccctttgtgaccttcgtccgaaaatcattatatcccaagggaaataatgcttcgtaggacgaaggacttaaccgattaacattttctatgttgccttgttcttgaagcatttgagaacaagtccccaacacaaaggatttctggtccacaatgtcttggttgacacaggcagtgcagctgacatcatatttgctaaggccttcagacaaatgcaagagccagaagataagattcatgatgctacacatcctctctgtggcttcggaggaagacaaattgtagcactgggcaagattaccatgtcagtgaccttcgggttcatcaacaacactagaactgagcaagttgtgtttgacatcgttgacatggaatacccttacaatgcaattattggtcgtggcaccctcaatgcttttgaagcaattcttcaccctgcctatctttgcatgaagataccttcggatcaaggacccatcgctattcatggaagccaggaagctgccagaagggccgaaggaaactggactaattcaaaagcaatccataacatagatggagctgaagcttgtgaacaatacaaattcagaagggagaaagcagcttcagcagatcagccgaagcccatgctcttatgtgaggatatagcagagcagaaggtgctgttgggctctcagttatccgaagaacaagagaaaaccttgataaggtttttgttcaacaacaaagatgtttttgcatggtcagccaatgatctctgcggagttaatagggatgttgttgagcactcgctcaatgtcgatccatccttcagacccagaaagcaaaggcttcggaaaatgtcagatgataaggccgaaggtgctcgcaacgaagtcaaaagactcctcagtgcaggagttatcagagaagtaaagtacccagaatgactagctaacactgttatggtaaaaaaggccaatggcaagtggcgaatgtgtatcgattttacagatcttaacaaggcttgtccgaaggatgaattcccattgccaaggatagactctttagttgatgcagcaacttcttcagagctcatgagtctgttagactgctattcaggctatcatcaaatctggatgaagaaggaagatgagccgaagactagcttcataactccaagtggcacatattgttatcttcggatgcctgaggggctcaaaaacgctggaggaagtttcagcagaatgactgcgaaggttctccagtctcagataggcagaaatgtgctaacttatgttgatgacatcattgtaaaaagcacgaagcaggagaatcatattgctgacctgcaggagaccttcgccagtttcagacaagctggcttaaagttgaatccagaaaaatgcgtcttcggagtaaagaaggggaaatttctaggatgcttggtttcaacaaagggaattgaagctaatccaagtaagattgaagctatacttcggatggagccaccaactacaaaaaagggggctcaaagattgacaggaaggttggcatctctcaatagattcatatccagatcagcagagagaaacttaccattcttcgaagtgctgaagtcagtcgaagtctttcaatggggaccaatccagcagaaggccttcgaagagctgaagcagtatttgatagatctaacagcactaactccacctacgccaggggctcctttattattatatgtggcagcttcgcactcagcggtaagtgcagcacttgtccaggagaagcttgatggccaagtcaggaagcaggtcccagtatattttgtatctgaagttcttagtatatcaaagaaaaactacacagaattagagaaggtgttatatgctgttttgatggcatccaggaagcttcggcactattttcaagcttacaacataattgttccttcttcacaacctctgaaggatattatgaagaatcgagaagctactggaaggattggaaaatgggctgcagagctcaatgaattttgtattgaatatgttcatagatcttcgattcagtcccaggcgttagcagacttcattgctgactggacgccaggggctcaggaggaagaaacaaataaagacgccgaagcatggacagtgttttgcgatgggtcctggggaaccttcggagcgggagcggctgctgtgttggtttcaccttccaaagttaaaacttgttatgcggcaaagcttgattttagttgcacaaacaacattgccgagtacgaagccctgcttctgggtcttcggaagctaaaagcaatgggaatcagaagggccgttcttaaaactgattcccaagttgtttcgggtcatattgacaagagttgcaaggctaaagatccgaagcttgaaaagtatctggatatcgttcgaagagttgaagcttccttcgagggattttctgtcaaaaatatccctcgaggacaaaatgagcatgctgatttgctagctaagtcagcagcacaggggctgcccttaccttcggatgtgttcttcgaaacaataaaagcaccttcggtcgaacttcttgaaagagcagtcctcaatatatctcctgtttatagcgaagattggagaactgagatcatctcttatcttcagggtaaattcctttcagatgatgaagcttataacaggaggatagaggcaagagctcgtccatatgtcatgatagaaggagagttgtacaagcatggagtttgtgctccgctactcaagtgtttatccagaaccgaaggtatagagttgatgaaagaaatacatgcaggcctgtgtggatctcacattggatctaggctgttacttggaaaaaatttccgccaaggattttattggccgaaggcagcttcggatgcagcggaattagtccaaaagtgcgaaggttgtcagaaatgtgcacgagatcaaaaacaaccttcgtccttaacacagctcatacaacccatttggccattgcaaaggtggggccttgacttgttaggtccgttaccaccggcccaagggaacctaagatatgttgtagtggcggtggaatatttttctaaatggattgaggcaaagcctttagccacaataacttcggccaccgtccaaaagtttttctggcagaatattgtttgtcgtttcggggtaccaaaggctatcactgtggataatggaacacagtttgactccgaagcttttagggatttctgtgatcaaattggtacgaagatccattttgcatcagtcagacatccggagtcaaatggactcgttgaaagagcaaatggcatcataatgacaggaataatgaagttaatcttcaatcaacccaggggaaagtggccagatcagttaaccaaagtggtgtggagccacaatacaacaacatcgaggtctacaggctttactccattcaagttattattcggtgacgaagcaataactccggaagaagctaaaaccggatcaataagggtagtagcttcagcagaatcaggttccgaagctgcttattctgtggaaaaagatgctttagaagggatcaggctgcaagccgtggaaaacatcaataaatatcaagccgaaacaattaaatggcgagatagaaaggttcggctaaagaatattgagccaggacacttggtgcttcggagagtggccaatccagaaacagtgggcaagttgcagttgaaatgggatggacctttcttaatagcatcttcgtcaagacccggttcatacagattgaaggatatggacggcaacgacattcctagatcttggaatgcggatgagcttcggcgatactatgtataactcgatgtaatttttcatatttcttatttttctttcatggcacccttttcctttccgaagggggagaaaggtttttaatggggccatcacatgtaatttccttttttagttctataagagcaaaatcccccaaggaatgtaaatgtaaaagctaagaacgcaccatcgagtgccgaaaagtaaaaacgaagaagctccaaagtcgttcctaagggaatgcagagcttacagcgaaaagtcaacgctgattccgccaaaagtaaaggcgaagaagctccaaagtcgttcctaagggaatgcagagcttacagcgaaaagtcaacgctgattccgccaaaagtaaaggcgaagaagctccaaagtcgttcctaagggaatgcagagttgaggtgtgattgtttttaagaaaataatggctatgagtatggcttcggaatacgtgtttggcctttcatttgcacatcacattacatcatagcatttgcattcataaacattcatccaggcatatgtaggataatcatcttcatggcataagtggttgcttcggcaaaaagaaaaaaaagaaggggaagaaagagcttcgtgtacaaaaaggagagcttcggaaaaaaggaaaatgttgttttctatgcttcgctgcgtacgaaaagaagggaaggtgttttttcgccttcggctcaaaaaagaaaatttcgtccacatcaaagcatttctcatacatcaatggaaggataaggatatatcacaaggtatgaacagaattcattaaagacaagttttagttacatttacaaaagttatctcaaaagtttctcaagtactgcctacagtctactatctaatctccaaggagcttcggcttcggcgtcatttttaatcatcggcttcggcttcgtcatcctacatgaataaggtcgttgtaagtcagagtcgaccttgcaggaaaaggtaagcacaaggtatggtttcttactggttcaaggtggctacgagcttcgtctccagccttttctcgcccaccttttgtccatatcatttttacaaatctattagagatacttcgggcgagatcaggaatgtcatctaggattgatggtgttaaagtgaaatttggcctattgacaatctttccatgatcgcagccagctttcaggaaagctgcagcagtgccccgagaagccacccaggcacagaagtcaccgtgcccagctatgacttcgtcgagctcgtcaatctcaccctcaatatgttcgaaggttttcggtagatcttcagctgagggggtgaatttttcactgctggccccaactgagtgaaaaatctttcttaatcgttgaatgcatttgttgctaaattccaaacatttttcttgaaggcttgtcaatagttttctcaaatctgaattttgttgagcttcggcttcaagtttcgcactaagatcttgcttttctcgttcgaactgttcagactgacggagaagcttcgtgttcagttctgttatttttgcttcagcttccgccaataaaccttcggttgcctggagctcaaagttctttttctcgaaagcatctgattgttcctttattttgctttccaaattttcaattataacttcgtgcttcctatcttcaaaatcttgctgcatttgcaaggctttgctcaacagcatactctgcacgagaacaaccttcgtcagacatgttttcattattagaaacaataaaagttaaggcaaaagtagttcaccttgaagttggaataaaataaactaccgacgatatgttgtcgtcggtagcggctgatgtctgtttctagcttcggaaagccgatactcttggacagagtaccgataactttggctccggtttgatctcgaatacaatctaatttttcatcatcaacgcctccgaagaggagtgctccaggtttgtatccgcaggattttgcatattctctaagctcttctctttcagcttttgacagtttttctccaactaaattctggaacatgaaggcttcgttttctgaagcttcatcagcaatttctttccctttctccgacgctgcggtcgcggcctcttcggcggcggtggtagcttcttctgcagccatgtctagcagtattttgtcaatgtgttcgattgtgctctccaggtttaaatcttcagccgaggcagcttcggcagctgcgacctccgaaggtgtaatttcaatatctgtccctttcgcagctgctggtgttttctgagctgaagctcttggcggtgtcttgtcaattacttctgtcacagtaataattctttgtttctttgctttggttattttcttcgatttttcgggctccttgtccttctgaaaaaactttgtcagttggggccccagtggacttagcttcgcaggtaaggattcagtcattaccttcagaatttcttcaatgtcagcggcagagggtgatgcgggggtttcttcttcgtcggatcttttacgcttcggagaagacgctctcttcctcttcggaattttcttctttggtagttctttttcatcttcatttaaggcttcagttatccttttccttttttggcctccggcacctttgttcagattttcgtaatcagggtattcgaaacctagggcgtccagcactcggtttagtcttcgcttcggacggatgccgaaggctgcggtcatcaactgatcttcttttttagaataattgccaagtatctcattgcacatcacttcaattgtatccagccactcttggcaaggtgttttgaagtatttcttaaacttgaagtaataaggtaagcgcatgagttcaccttctttcttctcccccttcagcttcggcatttcccactcctttacactaggaaaaactttgaaagccaaaaactcctgaaccaggtcccttgtgctgatatgctctgcaataattctgaattcattcattgcttgttgtgttggaccttcgggtgtcatattgcagcgaggtcgggtttctccgaagattaattcgagtggactttgtacaagcttttccttgtcgtcatcaaccttgacatagaaccactctgatttccagcctgctgcccatttgcttcggtagctaattacaggaaactttgtagatttccgataggcgaagttatagcaaccaaaattgtcgtgcaatccatcctttctagccttcgtttgataatgcaactcgtgaacccggcaaaagctgtccgcaaatggttccaccgcttggcttcggagtgcccagatataaacactaagcctaacgatagcgttaggggtcagctgatgaaaatagataccgaacctcttcagtacctctgcaataatcccatgtaagggaaatcttaatccagcctttaggaagctcttgaaaataacaatttcatccttctccggctttggggtagtttcttctcctccgaagcgtaatagcttcttctgattttcagtaaaaaagcctgactttaccatcttggacagatcagccttcgaaacagtagatttcccgaagtccaagtggctgggcttgcttggcatggcaatgcgataatcatcttcggaatcagtttcctcaatatcttcttcttctgcttcagcgattgcttgttctgcttgttctgcatcatcattagggatcttttccgaagtcaccagcccggatcgttgcatagcttcggagatgggaacagtctccgaagcttcagtctcgtccccctcacgctcaaccctggcggtagaacgcactctggccatttaattatgaacttgtggaacgttaatactttcttcctccgaagcaggtatcaaactggagcttcgttcgattccgacagacaagcttcggcgacggttaaaaattttggcagcaaaacagtgcaaatagcaatgaatgctgtggtaacttcacacctactcgtctgtttatatagtgttgcaggtaagaaggcgaagtgccaggatttttacaccaggcggacacccgctcgcgctcgttgcgtggtggaccgcagagaccgaacagtaactctgcaaggtggggccgctacacgctgggaaattgaatcgtttctcgacaacgagctcagggaaggtgttttttagaccttcggcgctccgaagcttaagagacttttttcacggatcaagctcgttacgaaaaacgatctagcaccgcgaaaggggctactgttgggcctatgcttcatcgccgaaggtcttctaggaagaagcggctttcggctgaagctgtttgtataagatggccgaaggttcctcttcataaagcttcggtattacaaaccgatctaaagatagaatgaccttttagtccataaaggtctgagtcaatgttgtaaacttttataaggggcatacttgtaattcctcacaggctgcgccctgtgcctataaatagtgaacagtattcctttactgttcaggcattcgctttttgcgtcacgcttgtactatcatctccttccagttgaaggtacacatgtaattcaatgatattcctgtttatgcctaataataatagataattgtttatgttgtcttttatattccttacatttcatccttcgtcactgtatgatgaatttatggaaatacatccttcataaccttcgtccagaaaccattatatcctaaaggaaataatgcttcgaaggacgaagggctttaacgattaacattttctatgttgccttgttcttaactcatagcatttgagaacaagtccccaacaccagctagccgaggcgttcgctcgggccggagcccttgcggtggacctggccgtggtcgtcgggtctgctcagtccgcccaagccgcagcctcggagtagcgtgcccgggccgaaggtatgtcttggctgtttctagatttcgattcagcttcattcttcaacttgcgtttgaagacttctgctttggctttttgcagggctcgagtctgccctcaacgagtccgccaaggcacttgcccaggcggctgagcagagggaggccgaccacgtggccatgtctgaggctatctcggccttctgccaggtctttggtctcgacgatgtcccctcgagaagctcccctcagagtcgcctgcaggtcttgggtgaccacgcacgcggcagactccgcgaggcgctgcatcacggcgttaggcaggccttcgccgtgctcgcttcccactacgatgtggatctggagcgggtcagcgaggggtactgccttcccgacgaagatgaagctgccctggctgaagttcagaggcttgacgcggccgccgcgggtccaagcgcggtgttggcgtcgactttcgaggcagagatccttccgcttgcgccgccgtccgagggcggggcgtatctcgccgagggtggaaacaaagccgagggtgcagctcctcccctgggcgatgcctgattctgtcggagcagtttattttgaatatgtatgtgtctttcgcggccgccgaggcctgaacactttgtcgtcgtgatataaagttgtgtctcttttcctcctgtttcgcgtatccagacttgttcgtcagtagcaggatcgcttacccaagtaagagttatttttcgcggtaggtgacgagtgaggtatccgtatcccggaggcgtaggagtccctcggctcggtcggccttgccgtttacatgcactcttattcatttctcggggttctgttactgatatagccgggaaacacgaacgtcgttttggtggaagactttttccgaggaaaattctgacgcagagggggttcccccttctagcccccgagggagggtcgggctttgctgtggcaaggctgacccttccttgatggttagactttatttgcgtatgtaaatgaggtgtatgaacgacttgaaaacatcttaagggtagaagcgacatagctgtcgaatgttccaagcgttgctgtagacctcgccttgactgttggccagcttgtatgttccgggcttcaaaattttggcgatgatgaacggcccttcccagggaggcgtgagcttgtggcgccctcgggcgtcttgtcgtaggcgaagcaccaagtcccccacctggaggtctcgggaccgaacccctcgggcgtggtagcgtcgcagggactgctgataccttgccgagtgtagtaaggccatgtcccgagcctcctccagctggtctagtgagtcttctcggttggtccggttgcttcggtcgtcgtatgccctcgtccttggggatccgtattctaagtttgtgggcaagatagccttggccccatagactagaaagaacggcgtgaagcccgtggctcggcttggcgtcgttcttagactccagaccaccgaggggagttctttcatccatcgcctgccgaatttgttgaggtcgttgtagatccatggcttgagtccttgcagaatcatgtcgttggcacgctctacctgctcattcgtcatggggtgagctacggtggcccagtccacccggatgtggtggtcctcgcagaagtccaggaactttctgccagtgaactgggtgccgttgttggtgatgatggagttcgggaccccgaagcgatggatgatgttggtgaagaatgccaccgcctgttcggacctgatgctgtttaggggtctgaccttgatccacttggcgaatttgttgatggcgaccagcaggtgcgtgtagccctcgggtgccttctgcaagggaccgacgaggtctagaccccacacagcaaacgaccaggtgatgggtattgtttgcagagcctgagcgggcaggtgggtctgctttgcgtagaattgacacccttggcaggtgcgtacaatcctagtggcgtcagccaccgcggttggctagtagaaaccctgtcggaaggcgtttccaacaagggctcgaggcgctgcgtgatgaccgcaagcccccgagtgtatttcttgtaatagctcctgaccttcggcgatggatatgcatcgctggaggatgcctgaggggctgcggtggtagagctcctttccatcacccagcaagacgaacgacttggcgcgccgcgccagtcaccgagcttcggctctgtcgaggggtaactctcctcggtggagatattgcaggtacagggtccgccagtttcgattaggcgtgaccccattccgctcttcctcgacgcgcagtgcctcaccctcgggggccgagggtaccacgggcccagccgaggttgcctcgggctgagccgaggccttctcgggctcgggcgtgtcgtcggtcttgactgagggttgatgtaggtctcgggagaagacgtccgaaggaaccgttgtccgccccgaggctatcttagccagctcgtccacagtctcgttgtatcgtcgggtgatgtggttgagcttgagcccgtagaacttgtcctccaggcgccgaacctcatcgcagtaggcttccatcttcaggtcgcgacagtgggagttcttcatgacttggtcgttgacaagctgtgagtcgccacgagcgtcgaggcgccggacccctagctcgatggcgatgcgcaacccgttaactagagcctcgtactcggccacgttgttggacgccgggaaatggaggcgcagtatgtagcggaggtgcttcctaaggggtgagatgaagagcaggcccgcgcccgctcctgtcttcatcagcgacccgtcgaaaaacatggtccagagttccggttggatcggagctgttggaagctgggtgtcgacccattcagccacaaaatccgccaggacttgggacttgatggccttccgaggggcgaacgagattgtctcgcccatgatctccaccgcccactttgcaatcctacccgaggcctctcggcactggatgatctcccctagggggaaggatgacaccacagtcaccggatgagactcgaagtagtgtcgcaactttcgccgcgtcagaattaccgcgtagagtagcttctggatttgtgggtagcggattttggtctcggacagtacctcactgatgaagtagaccggcctctggacgagcaatgcatgcccttcttctcgtctctcgaccacgatcgcggcgctgaccacctgagtggtagcggcgacgtagatcaagagggcttctccgacagcggggggtaccaggatgagcgcgcttgtgaggagtgcctttaggttcccgagggcttcctcggcctcgggggtccaagtgaaacgctcggtcttccttaagaggcggtacagaggtaggcctctttcgccgaggcacgatatgaagcggctcaaagccacaaggcatcccatgaccctctgtactcctttcaagtccttgatggggcccatgttggtgatggccgcgattttctctgggttggcctcgatgccccgctcggagacgatgaaccctaagagcatgccacgggggactccgaagacacacttctcgggattgagttttacgcctttttccttgagacacttgaatgtcgtttcgaggtcagagaggaggtcggaggctttcctcatcttgactacgatgtcatcgacgtaagcctcaactgttcgaccaatgtgctctccgaacacgtggttcatgcacctttggtatgtcgcacccgcattcctcaaaccgaatggcatagtaatgtagcaatacatgccaaagggtgtgatgaaagaagtcgcgagctggtcggactctttcatcctgatttggtgataccctgagtaggcatcgaggaaagtcagggtttcgcatccagcagtggaatccacgatttgatcgatgcgaggcagagggtagggaactttcggacatactttgtttagaccagtgtagtctacacacatccgccatttcccgcctttctttctcacaagcacagggttggctagccattcaggatggaatacctctttgatgaaccctgcagccatcagcttgtggatcttctcgcctatggctctgcacttttcttcgtcgaatcggcgcagaggctgcttcacgggtcgggctctagctcggatatccagcgagtgctcggcgacatccctcggtatgccaggcatgtccgagggactccacgcaaaaaccttggcgttcgcgcggagaaagtcgacgagcactgcttcctatttggggtcgagctcagagccgatccagacttgcttggaggcgtcgttgctggggtcgagagggacggacttaaccgtctcagctggctcgaagttgccagcgtggcgcttcgcatctggcgcctccctggagaggttctccaggtcggcgatgagggcctcggattcggcgagggcctcggcgtactccacgcactccatgtcgcattcgtacgcgtgtcggtacgtgaagccgacggtgatgaccccgttggggcccggcatcttgagcttgaggtaggtgtagttggggacgaccatgaacttggcgtagcatggtctccccaacactacgtggttggttcctcggaacccgaccacctcgaacgtgagggtttcctttcggaagttggagggagtcccgaagcagacgagcagatcgagttgcccaaggggctggacgcgcttctcggggatgatcccgtgaaagggcgctgcgccggcccgaatcgaggacagatcgatctgcaggagctcgagggtctcggcgtagatgatgttgaggctgctgcctgctgcctccgtccatgaggaccttggtaagcctgacgttgccgatgacgggatcgacaacgagcgggtacttccccgtgctcggcacgcggtcggggtggtcgccttggtcgaaggtgatgggcttgtcggaccagtctaggtagactggcaccgccaccttcaccgagcagacctcccggcgctcttgcttgcggtgccgagccgaggcgttcgccacttgcccaccgtagatcatgaagcagtcgtggacctcggggaactcttctgccttgtggccctccttcttgtcattgttgtgggctgtgccacattccgccggtggcccggtcttgtagaagtagcgccgaagcatgacacactcctcaagggtgtgcttgacgggaccctgatgataggggcacaactccttgagcatcttgtcgaacaggttggtgcctccgggaggctttcgagggttcctatgctcggcggcggcgataagatctgcgtcggtggcgtcgcgtttcgcttgcgacttcttcttgcccttcttcttggtgccgtgctgagcggacgcctcggggacgtcttccggttggcgcccctgaggctgcttgtccttccggaagatggcctcgaccgcctcctgaccagaggcgaacttggtggcgatgtccatcagctcgctcgccctggtgggggtcttgcgacccagcttgctcaccaggtcgcggcaagtggtgccggcgagaaacgcgccgatgacatccgagtcggtgatgttgggcagctcggtgcgctgcttcgaaaatcgccggatgtagtcccggagggattctcccggctgctggcggcagcttcggagatcccaggagttcccaaggcgcacatatgtcccctggaagttgccggtgaaagctttgaccaggtcgtcctagttggagatctgcgcaggaggcagatgctctagccaggctcgggcggcgtcggagaggaacagggggaggttgtggatgatgaggttgtcattgtccattccacccagctggcaggccagctggtagtccgcgagccacagttctggccttgtctcccccgagtacttggtgaaggtagtcggggttcggaatcgggtcgggaacggcgcccgtcgtatggcccggctgaaggcttgcggaccgggtggttcgggcgaggggctccgatcctccccactgtcgtagcgtcccccacgcctggggtggtagcctcggcgcaccttatcgtcgaggtgggtttgactgtcgcggcggtggtgctcgttgccgaggcgtctcggggccgcaggcgctgtgtcctgcgtgcgcccggtgtggaccgaggcttcccgcatgaatcgggaagtcgcggcgtgatgctccggggggtacccttgccttcgggaggcagagctttcggcccgtcggaccgcgacatcctccaggagattcttgagctctccctggatacgccgcccctcggtggtggatggttccggcatcgctcggagtagtattgctgctgcagccaggttctggccgaccccactggaaccgggggcagccttgccctggcatcgtcggcgatgcggtgcctaacgtcctgggccagatgacgcgcttctccggccggtgctcggcctgccccctcctgcccgatagtctgccggagctgcacaagttgtcctgcttcctcgtcgagcctggcctgtacctcgcggatttgctcgagctgtgcgtcctgaccccccgcagggactgggaccacatctagctcccgaagtttgtcaacgcgaggcacaggcctagggggatcgccgtcctccggcataccaagatggttgccttcgtcgagaccccctagatcgacgtggaaacattcgcgacttgggccacagtcctcgtcgccggctgtggctactatcggagcaatcggagaggtagtagtcacatgcggtcatgaagtcctgcatggcactagggttatcgagcccggagaaatcccaaccatagtcgggctcgtcatcttcctcggaacccgggggcccgtaggtcgagacggccgtcagtcggtctcaggttgaccgcatatgataccccggaaggttcggatatgcctctacgaaagcatccaccgaagcggggtcgcttggtgggtcgaagctgaatctaaaaggcacaagatgggaaacggacggtacctcttgatcgacggatggtgacgaagtcgcgtcagggacggactgcaccgtcatctcaggtacgaggctaacgcccagcaagtccttcacgagcgtgctggcgtcgtccgtctgcttggggttggcgtgttgcggggaaacgacgctcgtcttcgtctcacacgcgaggtcaacgcccgacatgtcccccattggggcgccggcgccatcgactcgctcgatagccgacgaggtgccgcctcctgcttggccatgcctgccccgcctcctcctccgtcggcggggagggtgacgggacagacccggatgttgctcttccatcatgtggggaagacgtcgtcaattccgccaccgacgggcgggctgacgaccgccattgtcgttgtcgcgcggcggaggaaggagtatcatgtcgtagctaccgtcgagggacatgaactcaaggctcccgaaacggagcactgtcccgggttggagaggttgctggagactacccatctggagcttgacgagaagctgttcgtcaacacgcagcaggcccctacctggcgcgccagctgtcgacgtttcgaccccggggggtccctggaccgacgagtaaattatcgttgcgtgtcccagcccagatgggtcagcgcgagacggaacacaaggggggaaacagtaagggaaaactgcgacctcgtgttgtcctacgcctagggcggatgcgcttgcagtagggggttacaagcgttcgagagggagagagagagagagactgtccgccagctcgttctcccgcgcggccaccttctcgtacgagagccctggaccttccttttatagatgtaaggagagggcccaggtgtacaatggggggtgtagcaatgtgctaacgtgtctagcaaaggggagccagagcccgatgtacatgtcgtcgtggctgtcggagaggtgttgctgccctgttcatgtgatgtcgtggtcgtcggaggagcgcttgagccctgtggaagcacagctgtcggggctgtcggatccttgctgacgtctccttggttccgtaaggggctgagaaccgccgttatcatggagcacgcgggatgccatcattacttgttttaccggggcgagccagatgggacgccggtcttgttccccatagcctgagctagctaggggtagggtaatgatggcccccctgtgacatggtcggtccgagcccgaggtcgggcgaggtggtgactcctccgaggtcgaggctgagtctgagccctagggtcgggcgaggcggagactgtcttccggagtcgaggctgagtccgagccctagggtcgggcgaggcggagaccgttttccagagtcgaggctgagtccgagccctagggtcgggttaggcggagaccgtcttccgaggtcgaggttgagtccgagccctagggtcgggcgaggcggagaccgtcttccggagtcgaggctgagtccgagccctggggtcgggcgaggcggagaccgtctttcggagtcgaggctgagtctgagctcaggggtcgggcgaagcggagaccgtcttccggagtcgaggctgagtccgagccctggggtcgggcgaggcggagcttcctatgacgcccgaggctggacttagctactgtcggcctcactctggcgagtggcacaacagtcggagcagggcaggcggcgctgttttcctgtcaggtcagtcagtggagcggcgaagtgaatgcggtcacttcggctctgtcgactgaaagggcgcgcgtcaagataaggtgtcaggcgatccttgcattgaatgctcctgcgatacggtcggttggcgtggcgatctggtcaaggttgcttctccgcgaagcctgcccgagctgggcctcggacgagttgaaggtgcgtccgttgtttgaggagaccctcgggcgaggcgtgaatctgacttggtctattgttcctgcccgaggttgggctcgggcgagacgagatcgtgtcccttgagtggacagagccttgaccggaatcgcgcccatcaggcctttgcagctttatgctgatgggggttaccagctgagattaggagtcttgggggtacccctaattatggtccccgacagaagtgtagcgtttttaataaaaaacggtttggtaatccttgagttgggtgcatgcataccacatcccggacatatatcaccatgaaaaaggttcgggagagaggggaaggcatgattatttcaaaagacaggtaggggagggaatccgcttggccaaggtgatgtgagaacgtatcctatgtacaaacccaccttcgtacacatatgcacaaaagtaatctggacccttcgtccaacatccttcagctttcttacaaaaaaacgcctcccacactcttctccctcatgctcaactgcatattcgtaaacccccccacacacacgttcagccgaaggattttgcatgagggatccagattgcttttgtgcacagaatacgttcctgatactttgtatacgtgttaggcggaccggtcagcgcacaagcgttaaggcacagaagtcgtgtgccctagcgcccagtacccacaaccattaagatgcggatgcatgcgggcgaacacacgacacatgcgcatgtacgtgcggctccctcgtcacgagtgcgcgtgcgagttcttcttgtctcgtgtctctgtctgctgctccttccctgccactgcttgagcgctatagggccggtttagtttagcttttttttgtcagatgagtttgtctaagaatctggattctcggagaatctaggtctggaggaaatcttgaatatggtggttccttccatcgcgacgactcgatggattctaaattcacattgattttgatgattttcattaagcgactctcacaaaaatgatccaagatacgaagcgtttgactgcagaagtgactcagggctgcgtgcggcgcgcgaggcattcggtgtacgttctattctagctagggctggaatgccaacactatataatcgtccatccttctaagcatcgaacgtacggcaattattgtagctactgctgctactaccttcaattcgtagctcactcatgatctcgtgcgtgcgtgtgcgcatctagctaggtaggctctctaaccatgtatactaaaacttgtttacggtagcacgacacatgttcatttcagacttccagtcatacattatgggcgtgattagttgccgcgctggctatatctaggctgagtagatgcgttgacttagaacatgcctgtgtttggttggatgtacggcacaaaacgagcttggcactgttggtccttccaaccaatcactatgtataagtaggggtgaagccagccaaaaacaccgtcaatatcaccatcattagagaatcgaatcatctacacatgaagtagtatattataatattcatttattggttttataaaatccatcagtgttagatggcaccaacaaatggtcctagctccgcccttgattataaagaaatcgtgttgagcagagtaatgcactacttacttacgacttatttggaagcacaccatttttttaaaaccaggttctagaaattggtttatgaaaaagttaggtaggatgtttgaaacctagcttctagtttttttaatatataattactagcataccctttctttatttttaaaaattgtggcaatatatataaattctatgaaattaacaaggatatgatgtaattaaacaaacaaaagctagttttagctaggagagaatagttttttggtttttaagaaactgataatgcagtttctataaactggaacataaactgatatatttgtaactataaaccagtttcttaaaagccgatgattctagacaggcccttaatgacaaagaaaatatgtgcgcgcctaagggcgaacctatgatgtgagtggggcacaggcccccggcttatttatctgttgtaagtagtagtgtctagatttttactatgaggtctctgattagactaatttagagtctccttctttaatattttaacgctcatccttacagatatgcactaggtcccattttttcttgggtcctgccgtgtgcgcgccatctcctacttctcgtgaagaaattaaaatcttcagctggtagctgccttttttagcggatacgtatcttccttgggtgagcatgtgtgcactttaaatctgagaccttctttgttaatctaacgatgactgctaaattttcgtttcgcccctcctacctccccttcaacactacagccatgttttccttacagaaaaccccccagctggttggaatctctccatagtctgcaacttctagctggcccaggtctgcgccgctgcgacctgcaatttccggctcgattctaccagcccaacgcccagcatctgctcttcgcaacatgaaggggtgcctcggcaagcgcccagtgttcaacgtcgagcgcctctcgacaagcgtcgtgtcgccatggatgggctcgttggcacttggcagcatggagtccgcgatgcaggagttgcaggttgggggccgggactcatctgctccgtgtgggttgacgcatgctgcagcatctgtacctgacgaggccatgtccaagattgtgtgattgtaccatgatttgttcaagatagtgaagtctggaatgcaaagctgggagcatgattgtagtgtgatatcagatgaagcatgattctttgtagtattgccaatttagattgtagcaataatgctattctcaggaatacaaaagaatggagcagctgatttagtaacaatatatgctttgtcattcacaattgaaattactttgcaggtctagtttgtttgtaacaaaatattccatgcaaggaacataacttggtttgtttgtaatttagtcataactgaataagttctcttgcttgctgaagagcaaacctgggcagacgctcggcttgctgcgagcaagcagactgggcaccccttcatgctggcagtagagacaaaaactgagcagctagtcacaactgaattcagaacatatgtaggtctgtgaagttctcagtgtactaattaaaactgaattcagaacacatgccacaaaattcagaacacaccaccaggaaattcagaacactcccacaaaactcagaagccgatggatttaagccgttcggactgctgcagctgcaatccatatagataaaatactgtagaaaaaacagaagccgatggatttaagccgtagcgaccagagtcagaacactaccacaaaatcatctatggacctcctgattcctgattgctattctttcgtttgcgtgtcttaggtatttctttagattttttattcatttactcctacccttaagatcaaacatcacttggtggatgtatatgtagtggttctggagcttgacaaacaatgaaatttttgtactcttgttgtgtactctgcactgtgggaggtataatctgacaaagggaatcttctatgcgtgttcgactggctgcaagccgacactgttgcagctgtttggactgctgcagctgcaatccatagagagaaaaatactgtagaagccgcagccgcagccggattgcagccgcagcaagccgcagcgaacaagccgtaagaaatctataccttcctttgaactgtttgcttgttgaatcaagtcgtctaacttgtttcgcacaattgcgattttttctttttttccacatcattaacatctattggcttctcagttaccttcctcatcatacgtgttgtctctacagtaacaaaaaagaaactatggtcagacaaaaaatgaacaaataagacaatatactttttacctcttgcatcttgtcgtgaatctctttgaaaagtaagcaaaaggtaattcatgacgcttttcacctcgcaaagttacaatggtatgtcaacatggaattccaattgactcaaataacatgcaagaacagtttccaaatatatcagatgtctgccaatgaaccaccctgtccttaacgacccatcataaattaccaccatcttcatattcccgaactcttctatatttacaacacaacagtgatccctagcagcttgcacttctgtttggaattttttgaacacgttgcgtgtatacagtatactaccttgtttctccatgggccatggagtgctcaaaagaggtgttgtatgaagactcatgtgatctttcttttaactcctcgtgtcgttggcattccaatgccatgtcaaatctaagccagaactcaataaaagataacttgtggtggataaagcggttaaagaatgaatttccacttttagatcttgaggtggtcttaagtagtcctgaaagaggtatatccataaattacgttggaatccatgactcacgaatttcatacctgttaaccaaaccaggtgttcctctctagtctgtacttaattatggaagcattccaccgtgtctcaaattcatctctagtttgtaacctccacaatttcattgtttttgtttgtagtgtcattaatttgccaaaaccaactataggtttagatgcactttcattgtaggctctatcttggaccttgaccattattgatgtcaaccacacccattgtatttgaatataattttcactatccgtattactcctgcttcgcattgacatgccttcttttgagactagtatcaggatctcaccaatgacttcattgccagtcatattgtcgagaggacgagatcagtgagttgaatccattctatccagagagggagacagaaatggactcacctccatcagttccattgccattactgcctcatccactagctctgctcccacatttacttttgcaatatcgacttcaatagaaattgtcagtgatcaacctccttcctgtatagtatataaaacattattattattggaaactctgagtaaataaatgatattagctaaggaatgtcaccaccttagaacattaatagttcttgatattgcgtggtaaaggaaacaatctctataatcaccagatctcagatcacatccactgatttcatgcagtaatcattagtagtggatccaaaaaaatagactaaaagggggataaataatagaaggctaaatgctactaaccttacatgtgatatcctggcccctgggatggtgatattctggtctaaggcttaatagaattaatagagtaaccataccaacaaggtgcatcttctttttcgaaagcctatctcgagagaacctccaagttaagcgtgcttggcttggagcaatttggaatgggtgactgatcggaaagttttctcggatgtgttggtatgtgaagacaatatatgatcctacagagctggtaggagtaagtaccgccggtccgggaatggacggggtgttacattacgtataaaaaacaaaataaataattccactagagatatgcaggtgattcaaacctttcctaaacgacatcaaaattgattgggtgtttcattaggtgacacctagtcacttagggttccaagaatctgaaagtaacaaatataaataaaatgcttcttgccaccactagcgcttaatatataatggaattaagtttatggagacaatctcaatttgctttaacacaattcttactcacatagtctcaaatcaaagaacaatatgagtaggaaaggagagcagagtcaaaattaaataaaatctttttggcccaagttaggtgggagctctatagaggagagattgagtggaaggatataattattgcaaccaacgaggaaacaacaattataggatttttttccagcactagaattttcgatcaaggaaattaatttcaacatgagagaccatgattggaaattctaacataatttctaacatcccattgtcaggtcttagacttccaagccagtttgaatttctagaccagaagcgaaaaccgcattaatggttttgacttggatttttcctactatgtctataattttgttagattttattgagcatatggatgcctgcaagttacttagcattgatcccttgatagtacatcattactaaaatcagtaaatgattagataaaaatatcaatttaattttttatctaggttgtccaatcatatatgttcatcctttgagagaggtagctccattcgtcatttgcactaagcatataaagatagttcactatggtgcttcataaattccattgtttttgtttgtagtgttgttaatttgccaaaaccaactataggtttagatgcactttcattgtagtctacatcttgtaccctaaccattattgatgtcaaccacacccattgcctttgaatataattttcactatctgtattattcctgcttcgcattgacgtgcattcttttgagactagtattgggatatcaccaatgacttcattcccaatcatattatcgagaggatgatatcgacgaaataatccattctatccagagagggagagaaatggacacacctccatcggttccattgacattactgcctcattcactatctccactcccaccgctactttcataataccgacttcaatagaaattgtaagtgatcaacttccttcatgtatagtatataaaacattactactattgaaaactccgagtaaataaatgatattagctaaggaatgacaccaccttagaacattgaaagttcttgataatacgtggtaagggaaacaatctctctaatcactagatctcagatcacatccagtgatttcatgcagtaaccattagtggcagatccaaaatatagactaaaagggggctaaataatagaaggctaaaatgctactaaccttacatataacaaacaaaataaataattccactacatatatgcaggtgatacaaacattttctgaagcacaccaaaattgattgggtgtttcatttcatttgatggcaccaagacatttagggttccaagaatctaagagtaacaaatataaatcaaatgcttgttggcaccactagtgcttaatatataatgaaattaagttcatgggtacagtctcaatttggttcaacccaaatctcactcacaaagaatctcaaatccaaggacaacgcaagtaggaaaagagaagtgagtgaaaataaaatcttgttgcctgagtgtgggagctctagagagtgaaaatagaatctaagagtataattattgctagcctcctcaactaatcattactctgttgaacatgtgaatattaaaaattacattcattgttagaaattccgacagtggtgtaattacaatagattctttagtgtaccaatgaagaaacatcaattgtgggatttttttgctagcatcagaatttttggtcaaggaaattaatctcaacatgataaaaacatgattggaaattccaatataatttccaacctcccatagcaaggtcttagatttccaaccttgtttgaatttctagaacggaagtggacaacacacttagggttttaacttagattttccccctattgtgtctataattttgtttgatttctttaagcatgtggatgcctgcaagttacttaacatcaatccccttgatagtacatcattgctaaactcagtaaatgataagataaaatatcaaatttaatttttatccaagttgtccaattatgtatgttcatcctttgagagcggtggctccattcgttatttgcacttctcatataaagatagttctatataatgcttcataaatcccattgttttgtttgcattgtcgtaaatttgccaaaaccaatgataggtttagacacattttcattttagggtccatcttggagcctgaccattattgaccacaatcgcacccattgcctcaaacatactttgcactatctgaaagggaattaggctttcacctagttcctaaatgattttggtggttgaattgcccaacacaaataaatggactaactagtttgctctagtgtataagttatacaggtgccaaaggttcacacttagccaataaaaagaccaagtattgggttcaacacaagagcaaagggataaccgaagagtgccctggtctggcgcaccggactgtccggtgcaccaccggacagtgtccggtgcaccaggggacttcacgctgaactcctcaccttcgggaaaatccagagccgctccgctataattcaccggactgtccggtgctccaaggaagaacggctctggaactcgccagcctcgggaatttgctccgctataattcaccggactgcccggtgtacaccggactgtccggtgagccagcggagcaacgactactttgcgccaacggtcacctgcaggcgcatttaatgcgcgccagaagcgcgcagaagtcaggcacgcgcgcgctggcacaccggacactctacagtacatgtccggtgtgccaccggacattcaggcgggcccagaagacagagctccaacggccggaacccaacggctttggtgacgtggctggcgcaccggacatgtccggtgtgcaccggactgtccggtgcaccatgcgacagacagcccccaccaaacgactagtttggtggttggggctataaatacccccaaccaccccacattcaaggcatccaagttttcccacttcaactacttacaagagcactagcattcaattctagacacacccaagtgatcaaatcctctccaaactccacacaacgccctagtgattagtgagagagatttgcttgtgttctttcgagctcttgcgcttggattgctttcttctttctttgattcttcattgcgatcaaactcacttgtaattgaggcaagagacaccaatcttgtggtggtccttgtgggaactttgtgttccaagcatttgagaagagaaagctcactcggtccgaaggaccgtttgagagagggaaagggttgaaagagacccggtctttgtgaccacctcaacggggagtaggtttgcaagaaccgaacctcggtaaaacaaatccacgtgtctcactccttattcgcttgcgatttgttttgcaccctctctcgcggactcgattatatttctaacgctaacccggcttgtagttgtgattatttttgagaatttcagtttcaccctattcaccccccctttaggcgactttcaattggtatcagagccggtgcttcattagagcctaaccgctcgaagtgatgtcgggagatcatgccaagaaggagatggagactggcgaaaaacccactacaagcaacgagaaagctctatcgggagagtcccgcaacaaggagaagaggaaggagaagaagaaggaaaagaagacttcttctcacaagtcgcatcggagtggcgacaaaataaagaagatgaggaaagtggtctactacgagaccgacacatcatcgccatctacctccggctccgacgcgccctccataacttctaagcgccatgagcgcaagaagtttagtaagatccccttacattatcctcgtaacttctagacatactccattactttccgttccattaggcaaaccgccaacctttgacggtgaagattatgctaggtggagtgatttaatgaaatttcatctaacctcactccacaaaagtatatggaatgttgttgagtttggagcacaggtaccatccgtaggggatgaggattatgatgaggacgaggtggcccaaatcgagcacttcaactcccaagcaacaaccatactcctcgcctctctaagtagggaggagtacaacaaggtgcaaggactaaaaagcgccaaggaagtttgggacgtgctcaagacggcgcacgagggtgatgaactcaccaaaatcaccaagcgggaaacgatcgagggggagctcggtcgcttccgtcttcgccaaggggaggagccacaagacatgtacaaccggctcaaaaccttggtgaaccaagtgcgcaacctcgggagcaaaaagtgggatgaccacgaagtggttaaggttattctaagatctcttattttccttaaccctactcaagtacaattaattcgtggcaacccaagatatactctaatgactcccgaggaagtaatcgagaattttgtgagctttgaatttatgatcaagggctcacgaaagatcaacgagcttgacggcccctccacgtccgaggcacaaccggtcgcatttaaggcgacggaggagaagaaggaggagtctacaccaagtagacaaccaatcgacacctccaagctcgacaatgaggaaatggcgctcgtcatcaagagcttccgccaaatcctcaaaccaaaggagggggaaggactacaaacctcgctccaagaaagtgtgttacaaatgtggtaagcccggtcattttattgcaaaatgtcctatatctagtgacagtgacaggggcgacgacaagaaggggagaagaaaggagaagagatactacaagaagaagggcggcgatgcccattgaaagtcgcctagaggggggggggtgaataggcggaacctgaaaattaaaactttatcccccaattagatcccttgattagtggttagaacaagatatacaaatatcggagaatagaaactaagttcttgcttgaaaggagtattgctaaataatgcgggagagataaatcaatacaattaataagttatagaataacaaagcaagtacccttagatgagaggagcactagaacaagttctttcttgcaacgagttgcttcactaaatggaaatttagcttgaagcaataccaaatgaaattagcaaataatggtgcaagaaaacttagagcaagggaaagcaaacaaatcacaagcaataaacacaatagacacgggtgatttgttttaccgaggttcggccctcgaaggcctagtccccgttgaggagtccacttaaggacgagtccttttcaacccttccctctctcccctgatcacacaaggatcggtgagctcttcttcttctcaaggatcactctcgatcccacaaggaccaccacaatctttggtgtctcttgctagcttttacaagcctccaaaactttggaggaagttcaatgggagtcaaaactccacgcgcaaatgaacacaaagatgaagcacacactatctctcaatgaatctcacaaggcactagtgctaaactcaaatgagtagctctcttttgtttgctctctcttttgtggcacttgtgttggttgtagtggtctaaatcttgtgtataggatggatcaatgaatatatgtggttgggagggcttgagtatgtcaactagatgacttggaatgttgcttgggctcccacgccttgaagtggccggttggggtggtatttatagccaccaatcaaaatgtagccgttggagaagactgcctgtcgtatggtgcaccggacagtccggtgcacaccagacatgtccggtgcgacagccacgtcacccgaccgttagggttccgaccgttggagagctgacttctgggcccgcctggatgtccggtggcgcaccggacatgtactatggagtgtccggtgcgccatgccacgcgtgcttgacttctgcgcgctctgtcgcgcattaaatgcgctggcaggtgaccgttggcgccgaagtagccgttgccccgctgtcacaccggacagtctagtgtacaccggacagtctggtgaattatagcggagcagccgaagtgaattcccgaggctgccgagttcgcgaggccgctcatccttggagcaccggacactgtccggtgtacatcggacagtccggtgaattatagcgcgtcggcttccgagaattcccgaaggtgaagagtttaaagtcgaccttccctggtgcaccggacactgtccggtggtgcaccggacagtccggtgcaccagaccagggtgccttcggttggccctttgctcctttgtttgaacccaatacttggtctttttattggctaagtgtgaacctttggcacctgtataacttatacactagagcaaactagttagtccaaatatttgtgttgggcaattcaaccaccaaaattaattagggactaggtgtaagcctaattccctttcaatctccccctttttggtgattgatgccaacacaaaccaaagcaaatgtaaaagtgcgtaattgaactagtttgcataatgtaagtgcaaaggttgcttggaattgagccaatataaatacttacaagatatgcatggattgtttctttatttttagcattttggaccatgctcgcaccacaagttttgtttttgcaaattctttttgtaaaacgtttcaaagtctttttgcaaattagtcaaaggtaaatgaataagatttttgcgaagcattttcaagatatgaaattttgtccacttgttcaaatgcttttcctttgactaaacaaaactccccctcaaataaattctcctcttagtgttcaagagggttttaagatatcaagttttgagaaatactacttgcaccccctttagaacacaaagagataccaatttgaaattctccaatgggtggtggtgcggtccttttgctttgggccaatactttctccccctttggcatgaatcgccaaaaacggatacttagaaagaaatataggccctaatcctaactacttgctctcctttggcaaagaaaacatatgagtgaagattataccaaagatggaggggcattgtggagtgatggcgaagggtagataatatcgatagagtagagtggaagctttgtctttgccgaagactccaattccctttcaattgtacctatgacttggtttgaaattcacttgaaaacacattagtcatagcatataaaagggatatgatcaagaggatattttaaattaagcatgatcatagttctatataacatagatcgctccccctaaatatgtgcgagaggaaaacatatgtttggcctcaaatgccaattgcacataattagataaatgagaacatatctatatcatacagaatgtgaagtgcattgtgtcatagtataagtgtaatgctcatgacagtttatgcacttatgaaagcatgttgtaaatatttcaagcttttcccttaaggatttcaaagaggcttaaggaccatccacctttggaataaaggcagcttatcctcgttacaaggttaagctttaagctctttgacaaataaatcacttcatctagtttcaacaaagatgcactaaagcatgaatgaatttttgagaagttaaactagatatgaagcagggatatgcatggacatgctttctcttccttttatacaagatatgcaaggaatgtatagaaaaggaagatttaggtacaagtttaaatgaaaggagatagttttacctttatgtacctttacatagggacgctctcttcattgtgctttgtccttggtcttagatgcttaagacctattcttaatgacaatatatggaaatattttgcacaagagagagttctacaactagtgatcttttcaagttattgttagcatatatcaaatggatcacaagttgcataaatgtatcatgaattccccttctaacttagtgcatatcaagagagatatcgattgatagtatatacggcactaagaagcatgattgttgattgaagtcattcaatgatcaaacaaataacagatgtgatcaaatgaacaacatacacattagattaccaattaagcttagagtaggagaatccagcaaatatgctactttggagtgaaagacaagaatttaaaaatagtagcatatttcatgagaaacttattctcaggcaagatactatatgaaattactgagataaagcaatagtctcaacaaaatcaagatatatgaatagactccccctaaagatatgcatggatgatttactttaaaaacaaatagggagaatcattatacatcttgatcaaggctcattaaattttgcaataacaacttaagcctagtaatctcataatgaaagtatttagaatactcacaaccacaccatttattgttttgaagaccttattatccaagtaggtgttgttgttcttgatgtcctcctctttcatttgagagtcctccctttgtagttgtttccttttcctttcaaacttattgaaaatactcaagaaagatgttaatagcacaagggagtatatgataaaagatgatttctttagatagaaaatatagacagttcatcattcataagtcacacagacatgaagtaaaatccttaacattagtacacattaacagaaacgaggaatgagcacctttttaatcatttttgatcaatcaaaggaattttactttttcatattgaatttattatcatgacttagaagcgcatcaatatgagaatggatatagcaaaggcatgaattagattctaatggacaagcgcatttatgaaaatgatattgaatgcatacttagttaatttcggtccaataaagaatctattcctcacaagggtagaatatgataatttagattaaatacccattgagatgggaaccaaacttaagaagaggagttcccatacctttgctttttacctttcttcctttgggtgaagatcaacccatgaggcttgtgcactttctttcttgtagattttcataattgaactcaagagaaatgttagtagcaacacaagcactagtttccatttttgtaatcattttgataaggaatgggaagctagattactaaaacatggaaacttcatagcatgaactagattatccatagatgatgttatgctcaattttaacttataaaacaagcataaataatcctttaagattatgagaataaatttagttcatgatatggaaagcgataaatgtgaaagaatcaaatccaatttaagtaagtagaaacacatcataaacatttggatttatattttttttcttttcatgttagattacacgcttctaaagagaaacttattctctacatgtgagactacttgggttacttagataaaaatcattagtctcactattttagttatagagagagttttccttttacaagtgtcctaaggatttgaattccttacatgacaccttattcttttaagaacatgaaatatctctctatatctagaatcatggcaataacaagataattagaggaagaatatgccatgacatacttgcaacaaattaaagcatgtagattgccatagaatggaaatgatgaatgtgcaaactaccatatgagaggaaattcttcaaagaatggtaatatcaatttaaagacatttaaagtgcttcaaattttctatgtgactacacaagacacataagaaatgatattttaaatacttgcacttaaaagataagtgttaccatcctttggctttcctccatgttgtaggccttgattttttcgcataagataattctttatttcctacaacatcaataacttcctcgagatgatatgagtttaagatgtagtagtttgaagaataaccttgggtcaatcacggatatagattattgaagattgatagcttgaatggactctctcaagcaccccaaggcttcatatcatctccttctcctacaaatcttgtcaagcatattttggtacccatcgcttgatgggtccatcatggttagtcaacaaagatctaggaacccaaaagtcctttgtgttagcactaggtaaactcattacctttctagcacaagttgcaattttgggttgcctagttacatgagaatcaattgacaagttaggagtgaaattgttaccaatgggacaatccttgcattgatgtcccttcttacggcatgtgtagcaaaggcgttttccaagatttgacgttttcttctttccttgtttgttgcctgctacatggttagtaaaaactttcttttctaaccctatgcctttttgttttaaatggggacaagatctaagcaagtgtcccttcttggagcatttaaaacaaagtctatcatccttgttaataatcaagccatttttaatgtagggacatgacctaatcaagtgcccctcttcaaagcattcactacacctcttgatgtgaagtgtggtttgatcattaccttggatgttaccttttgtggaggcgtggttgaggcttttggaggaggtgttgaatttcatcttttgtttcttcctcttggcaatcctcaaatccttgacattttcttcaagggatgtagtacatgccacggttgttcccgtctcaagcttcttcaccatgtgatcacggttatcttgagaaggttgggcaatgcatttcccttttagttgtgtcaagctcttctttagcctctcattttcttctttgagcttttgatatgaatcatcatttgttcctgcaaattctagctcaaaggaagatttgcttgttgacaaacaacaagcattagcacatggtaatatagtatcaatttgaatacatgtgcatgagtgaggttgttgggattttaagttttctatcacgacctcatgagcaatgtttaatatgatatgatcatccataagattttcatgagaacatagaagcatatcatatttatcttgaaaagctagattttcaacttttagcttttctacttggtccttaagcaaggtattcctatttactaattgagcgatacaatgtaaagcgttatcatgctcaattgaaacagtttcatacctttggaccaaatcaacatgagagcactttagctcctcatgttctttagtcaactcctcaaagtgttgcatcttcatggagagaatactttctagcctttgacgagcttcgccttgctctctcgctctttctataagtttgagcatgaccgccttatcttcttggcttaagcgagcgtagagttgcacaaagcttctttcttcctcctcatcctcatttgtgcttcctctatcatttgcattagccacacaacacatgtgggaatcgaaatgggaagacaaaccttttggagaggtggattcatcgtttggtctccatcgttcattctcttcttcttccttgcaagggttagcatcacaaatactaaaggaagtagagacacaaaatgaactatcatgtttggactcatcaaatttgcttctaattctagtccaaatatcatgcgcatcatggacagattcgtcatagtttgatatgaaggcatgataatcttctttgctaagagaattagttaagatgtcaaaagctagatagtttaagcgataacatctttgatcctcctcggaattaatttttccattgaaattagagggaaaaatactcttgtctataatttgttctaatcgaggatctatggttctaaaagcatttatcacactagatgaccatgaatcatagttagaacaatcatcaaataaaatctcaagagttacctcctttcgagttgggttctcctgggtcttcttgttcttttgggatcttctacgagccatcacttcgagttgttagactcaagatgaagtgcctagctttgataccaattgaaagtcgcctagagggggggggggtgaataggcggaacctgaaaattaaaactttatcccccaactagatcccttgattagtggttagaacaagatatacaaatatcggagaatagaaactaagttcttgcttgaaaggagtattgctaaataatgcgggagagataaatcaatacaactaataagttatagaataacaaagcaagtacccttagatgagaggagcactagaacaagttctttcttgcaacgagttgcttcactaaatggaaatttagcttgaagcaataccaaatgaaattagcaaataatggtgcaagaaaacttagagcaagggaaagcaaacaaatcacaagcaataaacacaataaacacgggtgatttgttttaccgaggttcggccctcgaaggcctagtcctcgttgaggagtccacttaaggacgagtctttttcaaccctttccctctctcccctgatcacacaaggatcggtgagctcttcttcttctcaaggatcactctcgatcccacaaggaccaccacaatctttggtgtctcttgctagcttttacaagcctccaaaactttggaggaagttcaatgggagtcaaaactccacgcgcaaatgaacacaaagatgaagcacacactatctctcaatgaatctcacaaggcactagtgctaaactcaaatgagtagctctcttttgtttgctctctcttttgtggcacttgtgttggttgtagtggtctaaatcttgtgtataggatggatcaatgaatatatgtggttgggagggcttgagtatgtcaactagatgacttggaatgttgcttgggctcccacgccttgaagtggccggttggggtggtatttatagccaccaatcaaaatgtagccgttggagaagactgcctgtcgtatggtgcaccggacatgtccggtgcgacagccacgtcacccgaccgttggagagctgacttctgggcccgcctggatgtccggtggcgcaccggacatgtactgtggagtgtccggtgcgccatgccacgcgtgcttgacttctgcgcgctctgtcgcgcattaaatgcgctggcaggtgaccgttggcgccgaagcagccgttgccccgctgtcacaccggacagtccggtgtacaccggacagtccggtgaattatagcggagcagccgaagtgaattcccgaggctgccgagttcgcgaggccgctcatccttggagcaccggacactgtccggtgtacaccggacagtccggtgaattatagcgcgccgtcttccgagaattcccgaaggtgaagagtttaaagtcgaccttccctggtgcaccggacactgtccggtggtgcaccggacagtccggtgcaccagaccagggtgccttcggttggccctttgctcctttgtttgaacccaatacttggtctttttattggctaagtgtgaacctttggcacctgtataacttatacactagagcaaactagttagtccaaatatttgtgttgggcaattcaaccaccaaaattaattagggactaggtgtaagcctaattccctttcacccatgtttgtcgggaatgggactctaacgaaagctctagcgactcctccgacgacgaggacgccgccaacatcgccgtcaccaagggacttctcttccccaacgtcggccacaagtgcctcatggcaaaggacggcaaaaagaagaaggttaaatctaaatcctccactaaatatgagtcttctagtgatgaaaatgctagtgatgaggaagataacttacgcactctttttgccaacctcaacatgcaacaaaaagagaaacttaatgaattgattagtgccattcatgaaaaggatgatctcttggacacccaagaggacttccttattaaagaaaataagaagcatgttaaggtcaaaaatgcttacgctctagaagtagaaaaatgtgaaaaactttctagtgagctaagctcttgccatgagactatagacaaccttagaaatgagaatgctaatttgttagctaaggttgattctattacttgtaatgtttcaattcccaatcttagaaatgataatgatgatttgcttgctaagattgaagaattaaacatttcccttgctagccttagagatgaaaatgaaaaattgcttgctaaggctaaagattttgatgtttgcaatactactatttccaaccttagaagtagaaatgatatattacatgctaaggttgtagaattaaaatcttgcaaaccctctacatctaccgttgagcacacttctatttgtactagatgtagagatgttgatatcaatgctatacatgatcacatggccttaattaaacaacaaaatgatcatatagcaaaattagatgctaaaattgctgagcatgaacttgaaaatgaaaaatttaaatttgctcgtagtatgctttatagtgggagatgccctggcatcaaggatggtattggcttccaaaagggggacaatatcaaacttaatgcccctcctaagaaattgtctaattttgttaagggcaaggctcccatgcctcaagataacgagggttacattttgtaccctgccggttatcctgagagcaagattaggagaattcactctaggaagtctcactctggccctaatcatgcttttatgtataagagtgagacatctagttctaggcaaccaacccatgctaagttgactaagaagaaaactcctagtgcatcaaatgagcataacatttcattcaaaacttttgatgcatcttatgttttaactaacaaatccggcaaggtagttgccaagtatgttgggggcaaacacaagggatcaaaaacttgtgtttgggtacccaaagttcttgtatctaatgccaaaggacccaaaaccatttgggtacctaaagtaaagaactaaacatgttttgtaggtttatgcatcctggggctcaagttggatcatcgacagtgggtgcacaaaccacatgacaggggagaagaaaatgttctcctcctatgagaaaaaccaagatccccaaagagcgatcacattcggagatggaaatcaaggtttggtcaaatgattgggtaaaattgctatatcacctgaccattccatttccaatatttttcttgtagattcattagattacaatttgctttccgtttctcaattatgcaaaatgggctacaactgtctatttactgatgtaggtgtcactgtctttagaaggagtgatgattcggtagcttttaagggagtgttagagggtcagctatacttggtagattttgatagagctgaactcgacacttgcttaattgctaagactaacatgggctggctctggcatcgccgactagcacatgttgggatgaagaatcttcataagcttctaaagggagagcacattttaggattaaccaatgttcattttgagaaagacagggtttgtagcgcatgccaagcaggaaagcaagttggtgcccatcatccacacaagaacatcatgacgactgacaggccactggagctcctacacatggatctatttggcccgatagcttacataagcatcggcgggagtaagtactgtctagttattgtggatgattattctcgcttcacttgggtattctttttgcaggaaaaatctcatacccaagagactttaaaaggattcttgagacgggctcaaaatgagttcggcttgaggataaaaaagattagaagcgacaacggaacagagttcaagaactctcaaattgaaggcttccttgaggaggagggcatcaagcatgagttctcttctccctacaccccacaacaaaatggtgtagtggagaggaagaatagaactctattggacatggcaagaaccatgcttgatgagtacaagacttcggatcggttttgggcggaggcggtcaacaccgcttgctacgccatcaaccggttatatctacaccgaatcctcaagaagacatcctatgaactcctaaccggtaaaaagcccaatatttcatattttagagtctttggtagcaaatgctttattcttgttaaaagaggtagaaaatctaaatttgctcctaagactgtagaaggctttttactaggatatgattcaaacacaagggcatatagagtctttaacaagtcctctagacaagttgaagtttcttgtgacgttgtgtttgatgagactaacggctctcaagtagagcaagttgatcttgatgagataggtgttgaagaggctccatgcatcgcgctaaggaacatgtccattggggatgtgtgtccgaaggaatccgaagagcctccaaatgcacaagatcaacaatcctcctccacgcaagcatctccaccaactcaaaatgaggatgaagctcaagttgatgaaggagaagatcaaagagatgagccacctcaagatgacggcaatgatcaagggggagatgcaaatgatcaagacaaggaggatgaagaacaaacgccgccacacccaagagtccaccaagcagttcaacgagatcaccccgtcaacaccatcctcggcgacattcataagggggtaaccactagatctcgtgttgcacatttttgtgagcattactcttttgtttcctctattgagccacacagggtagaggaagcacttcaagattcggattgggtggtggcgatgcaagaggagctcaacaacttcactaggaatgaggtatggcatttggtttcacgtcctaatcaaaatgttgtaggaaccaaatgggtcttccgcaacaagcaagacgagcatggtgtggtgacaaggaacaaagcccgacttgtggccaaaggatactcccaagtcgaaggtttggatttcggtgaaacctatgcacccgtagctaggcttgagtcaattcgaatattattagcctatgctacttaccatggctttaagctttatcaaatggacgtgaaaagtgcattcctcaacggaccaatcaaggaagaggtctatgttgagcaacctcctggctttgaagatagtgagtaccctaaccatgtctataaactctctaaggcgctttatgggctcaagcaagccccaagagcatggtatgaatgccttagagattttcttatcattaatggattcaaagtcggaaaggccgatcctacactcttcactaaaactcttgaaaatgacttgtttgtatgccaaatttatgttgatgatattatatttgggtctactaacgagtctacatgtgaagaatttagtaggatcatgacacaaaagttcgagatgtcaatgatgggggagttgaagtatttcttaggatttcaagtaaagcaacttcaagagggcaccttcctaagccaaactaagtatactcaagatattctaaacaagtttggaatgaaggatgccaaacccatcaagacacccatgggaaccaatgggcatctcgacctcgacgagggaggtaaatccgtcgatcaaaaggtataccggtcgatgataggctctttgctatatttatgtgcatctcgaccggatattatgctttccgtatgcatgtgtgcaagattccaagccaaccctaaggaagctcaccttacggccgtaaaacgaatcttgagatatttagtttatactcctaagtttgggctttggtatcctaggggatccacatttgatttaattggttattcggatgccgattgggcggggtgtaaaatcaatagaaagagcacatcggggacttggcagttcttgggaagatccttggtgtcttgggcttcaaagaagcaaaattccgtagctctttctaccgccgaagccgagtacattgccgcaggccattgttgcgcgcaactactttggatgaggcaaacccttagggactatggttacaaattaaccaaagttcctcttctatgtgataatgagagtgcaatccgcatggcggataatcccgttgagcatagccgcactaagcacatagccattcggtatcactttttaagggatcaccaacaaaagggagatatcgagatttcatacattaatactaaagatcaattagccgatatctttaccaagcctcttgatgaacaaacttttaacaaacttaggcatgagctaaatattcttgattccaggaacttcttttgttgatttgcacacatagctcatttatatacctttgatcatgtctctttcatatgctatgactaatgtgttttcaaggctatttcaaaccaagtcataggtgtattgaaagggaattggagtcttcggcgaaaacaaaggcttccactccgtaactcatccttcgccatcactccgagcaacactccgtctttggtataatcttcactcatttatttatgaccaaagggggagaaagtaattttaagggctctaatgactccgtttttggcgattcataccaaagggggagaacgtattagcccaaagcaaaaggaccacaccaccatctaatttaaaaagagtttttcaattggtatgattctcaattgataaatttcaaattggtatcttattgtgttcaaaagggggagaaaagtagtatttcaaaattgatatatcaaaaccctcttgaacactaagaggagaatttcatttagggggagttttgtttagtcaaaggaaaagcatttgaaacagggggagaaaatttcaaatcttgaaaatgcttcgcaaaatcctattcatttaccttgactatttgcaaaagaaccttgaagaggatttacaaaagaatttgcaaaaacaaaacatgtggtgcaagcgtggtccaaaatgtcaaaaattgaagaaacaatccatgcatatcttatgagtatttatattggctcaattccaagcaacctttgcacttacattatgcaagctagttcaattatgcacttctatatttgctttggtttgtgttggcatcaatcaccaaaaagggggagattgaaagggaattagggtttcacctagttcctaaatgattttggtggttgaattgcccaacacaaataaatggactaactagtttgctctagtgtataagttatacaggtgccaaaggttcacacttagccaataaaaagaccaagtattgggttcaacacaagagcaaagggataaccgaagagtgccctggtctggcgcaccggactgtccggtgcaccaggggacttcacgctgaactcctcatcttcgggaaaatccagaggcgctccactataattcaccggactgtccggtgtacaccggacagtgtccggtgctccaaggaagaacgactctggaactcgccagcctcgggaatttgctccgctataattcaccggactgtccggtgagccagcggagcaacggctacttcgcgccaacggtcacctgcaggcgcatttaatgcgcgccagaagcgtgcagaagtcaggcacgcgcgcgctggcacaccggacactctacagtacatgtccgatgtgccaccggacatccaggcgggcccagaagacagagctacaacggtcgaaacccaacagctttggtgacgtggctggcgcaccggacatgtccggtgtgcaccggactgtccggtgcaccatgcgacagacagccccaccaaacggctagtttggtggttggggctataaatacccccaaccaccccacattcaaggcatccaagttttcccacttcaactacttacaagagcactagcattcaattctagacacacccaagtgatcaaatcctctccaaactccacacaacgccctagtgattagtgagagagatttgcttgtgttctttcgagctcttgcgcttggattgctttcttctttctttgattcttcattgcgatcaaactcacttgtaattgaggcaagagacaccaatcttgtggtggtccttgtgggaactttgtgttccaagcatttgagaagagaaagctcactcggtccgaaggaccgtttgagagagggaaagggttgaaagagacccggtctttgtgagcacctcaacagggagtaggtttgcaagaaccgaacctcggtaaaacaaatccacgtgtctcactccttattcgcttgcgatttgttttgcaccctctctcgcggactcgattatatttctaacgctaacccggcttgtagttgtgattatttttgagaatttcagtttcgccctattcaccccccctctaggcgactttcactatccatgttgttgttgcttccaattgatgtatcttattttgaggctagtatgaggatcttactaatgacttcattcccagtcatatagtcgagaggacgagatcgacgaactgaatccattctgtctagagagggagagagaaatggactcacctccacccggttccatttgccattaatgcctcatccaccagctccgctcccaccgctactttcacaatatcgacttcaatagaaattgtgagtgatcaacctccttcttgtatagtatataaaacattattactatttaaaactccgagtaaataaatgatattgagcgcgttcggctgcactacaaaaagcactgttgcagctgcaaaatactgttgcagctgcaatccctagagagaaaatactgtagaagccgcagccgcagtcggattaaagccgcagcgaacaagccaattagctaaggaatattgataccaccttagaatcttgaaaagttcttgatactacgtcttaagggagcagtctatgtaatcactagatattagacatccaataatttcatgcagcaaccattagtggtggatccaaaaaagcagaccatgagggggctaaataatagaatgctaaatgatactaacctagctacctatatataataaaaaaatataaatgatgatatccattattctatttatgcttaattgtaacttaagcccgataaattttgtctacaagattggatgctaatttctgatgtatctttctgaaaattgagctacatagtaagtatatagctactgtttttttgtgtgttttaaattaattatatgtatggcgcaactaaggtcatccatggaactcctctaattaaaacacttaaattttacggcctctagcatcttattttgaataggatgtgaagcctaaagcatatctaatattcgttctacaagaagtagcatgcatgctaacaaatttggacgacaaaattgcccaggtgctggataagagctagctaggctaataatatagctgactgctgactatttgcgacctatctcttagtccatctacataatagttaagtgttcactactaatacgtaactcatttgtctctcagtttttttggttcttatatctatgtcttagatggttgtaagtttatagctcgtttatcctctctcatcttctctcctgtacctcatcatttatcctgcttagaacctgctgttgtacttgctctatagcataacatggtcagttcattgaataaatctgaaaaatattcatcacaaacaaaacaaacaaacaagaaaccgagaaccaagaactcagccacagattcctacaacaaccaactttgcttctccttgatcagatatcaaaattcctggcgctcattttttttcctgaaccgagattacctctgcttatgttgaaaacaatgcctagccttcttttatgctgtatcattgcatcacctgtcccatacacgcaaatgtctttgctaatgccatgatttaaagtagacaagaagaaagaaaaagttaacaaaggaataaaggaggaaataaataggattgctcttaataattcagccttcatttgcctgttagcatgcatgcatgtataatgttccctatgaactcttctgagttgagaagcacgtactcagaaatgtagccagaatcaaatttaactttatgtatcctttatctaagaaaactttgtgtgtatatgtgtacgtctatgatctcatgcaatttttcctgattgagtctagatgtctagccttgtcctcttgctagctggagagtaagcctggttgtagttgccattgttgtttgcttgggattgggatgaaccggctgtctggttatcctcagtcttgaagctgaagcatgaggcatccagcacgcgagatggactcgcactgtagtctgttttcttcttcactaatcccacttcttgcaatgcttcatggcatctccttacattttcctagaaatgtaaatacgtacattaaaaaaatactaaaccttcacagagagtgagagagagaggggatctacaccttattgacagggatattagaagctaaaagaacgccgctgaaggcaatgacttgagactcagcagctgctgacagaaccactgctgctgccatctcagaaggcctgaactgtaggagcttcgttgctgcaaatcaaatgcacacatacatctatttagaggcatgttccaatcatatagtaacaattgcttatcgaatggaaaaggcgggcaagtatgattcgctcatgcatgaagtaatctgatgtaccttcaacactgccaagtatgatatcggtgcaccgagaaatgaatccgcaacttagcggcttctcgccagtgaacttgtccacgaaatagttgatataagagaatggcgtcacagcttgcatcctccaattcagagagtctagaacgtaaatctccatcctctgaatagcatctaaatcgaaactgtacttctcgctaggaacctgtgacatatatatatataataaagataaagattttgggaactcaaacgtgaatctgtactgtatatccaattttgtccacctgattctgatggatgtccagacggcgaggaaccacagtctcctctatcttggctgcaatggttaggcaagcaacggacagcagctgtggcatccagggctggtggtcagcatcagcctacaccaacaagaaactcatataagatttgtgccccctcaaaatgtaaggttgtgtttggttgcaggatagctaggactgtcgagcgcagtcacatcccctcatctgtccaattctaacgtacaactgcactggaatggtcctaactcaactcatgatcctaaaccaaatggccttatctacttatcagacgaaagtgcacctcaaatccaaatatacatgtatttttatatgaatttagctatagttattgacacttataatctcgcatatatgctgtctttagttcctgggtccaccgctgaaccaaacacgccataaggttttctggagagggagaggcaaagacctttgacaaccagtggcggacgcaggacaaaaattcataaaaggtcaaaaagaccacatgagagccatgattttctagttcaccaagctcaccgaccgtaggagacaagtcatatcgttgcgatgagcgagatctagcttgtcaagcggatcgacgtcacgataaaaacaggacaagggatggaggcgccaggaaggggcgaagtcgggtggcgtcgcatcgggaatgagccggcggcggaaacggggcagcgagcagactggtttaagtggtgtcgggaagattagggtcagactggtagatgcaaggactggactgagaggatccgacgagcagactcataacatggttgttttaggtcatgttctaaatctctagagctaactgttaaccggttttagctgggttggggtatctaacaactaatacttatttgaggggtatagctaacaattagttgatctattctaaacctctcaactaattttagcaattagctattagttttagagatttagaacaagactttatactatcttaaactttgtttttttgtacacttaaaactaaataatcattagacataaaatggtgtacaaaattgaggggggcatggccactttatccccctggatccgcctctgctgacaaccacatgctgattggacatgtacaaaaaagaataaacaagttgggtacatttgtagaactcactgggacttgatttgtggagaggaccctatcaagatagttaacagcaagataagcagacaacggtccaaagtcgtgataagcctgggcctgcaattaatacacatgtaagagacaagtagtacacatttcagtaactatatatatatgcaaaacgaggttttggtcaagcaaggagggcaaacttctttttttgaacaaactgaagtttaagtcaaacttggagtcaaataaattgcattttgctgcaaaacacagaaacatgagattctaactaggatgcgcgagaaatcatatacatactatatagtatatggatggagaagcagagaaacctttttgatccaatcaatggcggcaatcctacaagatgactccagtcctccactgctcagcctctggaggtaatcccccgtcgcaacgctatgcagctgctccttctccttctccatcagggatgctacgacctcgtcgctctgtgatggcagcgcagcaaaggtcgtgtccatccccaacaccagaagccccacctcttcgtcgtcgtgcccattgcatccaaacatgccggccacgtcctcttcacacagcagcgaagaggaggcacggccacagcggaaccccatggcgagatcgaggttgctcaaagaaactaaaaggtgttctcttggcaattcatggaccaggagctatagggtccgaaggatccaacttgttggctatgccattgttggggatatgatggtaactctaatctatctcttcatttctctatctatctgctgcttgttggaggtctgaagaagaaatgtgaaggtctgggtgttttatagggtggtgagcgtttatgtgtaattaatgcttatggctgttgtagatttttttgtggaattcttttatatactgcttcacccgcttataagatgtgagtcgaaaaatcaatgttgaaggtcactatgaaatcttgtatattctgaaattaagttgaattcttgatatgtcttttttttttctgtaggatgtggctgccattattctttttatctagtttgacgtgtagatggcagaaattgatcaaagtggtactaaaaggttcctaaatgcattctttttcaatgtctatcgaactgtacatcaaaacatgattgcattttggcaagcaaatattttgtgcgcgcagaaatgtgattatatttttgtcattagaagtgtgctaattctagtcacattatgtttggttgccaaataatttcctaaatcaacatgttgaaaaagagcaagatttggcattcatcaagtttcttccaagcaaggcgtggttcttcgtggcaatatccaactcattattgcagagccaattacttactagagatagagcatatccatgccaggcccaagagataccttttgaaagatcatgaaatttgccaataataataaataatgcatgctttgaaacatgtgggagataaatcttgaacaaatgttcatgaagaaagaaaaaaaattgaatggaacgaaggacctccaatgatgtgactaaaattactaggattagcatattactccgacaattatgtatggttttaattgtttcttgatccgtggtataggagttctattcgagatgccagccttttccttttgtgacttgcattcacctaaaacatcttcgcaccaacttttctgccgttggtcattcattattgtcacactacccggccggccagtcttcttccatctcttagatattattatacttatagcaattaatgacagtttggaatgcaacgcctctctctctctctcatttttttacttcttgatacactttttatgaaaatttaaaatatatcatgtctctactaaattttaaaaataacacattatcgtcttcttgtgcaatgacctccaaaagttgtccaccaggaaaataatttctgcacttttcattaaaatcatttccccatagaattattttcattcaagaattatattttatgcatgtagaatcattttctggtggatggttttgcaaaagtaattttcccttggatgacatttgaaagttatttcaccaaaagatgataatgtattatttttaaaattattgaaaatataagatatatgtttttattttttttaaagtatcctctccctcccactatagatgacatgataacatggtgaatacaaatatacaagactatgactacaaatctataaatcttaggtcattcaaatataagtctcagttcaagtgttcaactatatattatacaactgaccaaatcaaaacaagtctcaaactcttagagactcacataatttttcttgctcaagttgaagtgttttagaaatgaagcccaagtgccaaactgccaagttatgaaagcaagtaaacacatgagagaagaaaattttgagctttgtacaaaaccacctcattagaacctttctagataaaatccacacctaatgagaaaccttagaaataaaaagagtaattccaactcattttaaatccaaatatacaaagttattataaaccatagtttacaatgacaccctctaatgttcaatctcactaagtcacattcaatctcattatccatgacttgcaacatcctagtcttcatcaagccataggttcttgaaggagtcttctaactcttggttccccaccttgttgtgctctttgttggcctaactcaaagtccttaatgtagattaacatcttcaccatctctgagttcaattgtcgtcactactcctcatggatcgtgctagtaagactaaagcaagactccaaagaaatagttgagacatgaacttatttaatttttttatcccttgtaaagagaacaagatatgttagtttatgctcatggcaccaactgaggatatcaaactcatcctcataagctacaatattatcactatcaaggtaaaagtaagctcaaaaagacaaggacaaggaccaggagttacatttctacatcaatagtgacaagtgaagtacccgtaacacatggtcctaatcctccaataattttgtcccacgcctgatttttcttaactattacttctgatggatatgtattcctagatggcctaactacaccaaacttagattcataattattatatatcttatacaaatctatcttagcctcaccaaaataggtagtataactcatattgttacattaagcaagcaatcaagagcattatataaacctctcatcttggacctagggtcgaggacaaatgcaaatttatataacatgggtatagccttcgagtactcgagaaacttagacttttttggcattacaacattgctaagatttcttcatgttcaaagtcatgtaaataactagcgatctcaaggatgtgatgttgtatcaaaggacttgtggggtaataaatgccatatagaacaacaattgaatcatataacaattcaagaaacttcaaaaccttttcaccaacttaccaatgttgttcatctagaagtggataaacatagtgagtatttatgaatatataaaagatactcctatatgcatggcatgagatgatttagcatgagatatgttgagttccatctaacatcgaaatctaaaccaaacttatgagggcacacacccttagcattaccatagtttttttaataaaacaatgtgttagtttattgaatttaaaaagttaagttttaaatacatatgtggaaagcttaatcctctttagattagattcgacaattagattaattatatggaaagcaaagtgttgacgtgcaccattataagtcttcgcattaggatctactatattaggaccatcgcctaaataactatcaaacataggttacaaaataagcatagaagatatattagaagaagaattatcaagagtaataaatacaactttgtcaagcagacaaaatcttaaccacactagcaatacattctacaatgttaataccaaaatggcacacttgaatcaatttaagacctatcacaaacttcttaagtttccaatcaacattgataaaatgagcaacaatagtaatgtaaactttattagctttactagatcaaatagtagaaattaaagcaattgaagacagtaggaaaaacatctttaagatgaatgtgttttcattgtataccttaactgaatctctagctatggtaaatatagataatttagcaaattctaaggttgtgagcatgctggatatactcctcccaagcatttgtgccacttcctaccaaaagaagatcaagtttagcaatcaaacaacattactcagttctaccaacattagattaatattcctagtttctaataaattaattagggtttaaagcaatcttcctctaagccatagcagtgtgcccttctgtgtattttttccaacgcctattcaacctcatattacctagaataagttgtggacttcttcaacgaaataaagtctaatggaaatgattttaatgaaacaagaaccatatataatatgtttcttgatcttttctaggaaaactttttattttttattttatcctaaagatatacataatgagtgtattatgaaatattaattgtctagctttgcatacatcgcaacttaattcatacttcttcctacatggcttttgatgctgaagaaaatggctggtactaccattagaatgagcatgcaatttagacttatagaacttgccaaatccaacaacatacataaatttaccattcactatttcaaagacttcagtgaagtcctcctagatagtagattagggccacttgctagtggcactagacatgaatgatttatgattgttagagcccacaacaccactagtcgacgttgtctccaagttaattgaagcaacactgctacctaagaaggcatcaatagtgtcaccctcgttatcagcatcattaggggccagcctacatgcaatgaggtcttcattgatgcttttaggatagatggcatcatcatcatcattcatggcacctcgaacctcactattttctccttctcatcactgtacttaaataacaggtgcgacaccaacataatgcatcgactgatgacatgtgacaaaaatagatataaaacaagattgagttagtgagtatagttcatgttaggattgaagagatctacagttgtagtttaggatttatgtgcatagctagagcctagagctaaaagagtggagatgatgacatgctgcgaccgaattatgtgctaattatgagtgacgagattatgagtgatgagatcgattggtggcaaactacaagtggtaccaagaggttaaaagtaagacgagaatacaagaggacaagatgtgagagggtgagaggagatctgtaagttccagcggtggagaagataattagagaggcgacaatagtggaaagagagaatgatgagggtacaagagaatattctcaaggttcgatggtggagacaccactagagatgggtaggacaatgagagaggcgacgacgatggtaggtggtagcggcagatatgtgatcaagaggtggatagaggacgagtggtcggaatggattgtggaatgaggattagggtttgcaggaggagcggccatagctaaggttttatcttccctagctagcaggtcttggtcgtgcacgcattggcggccatgctaggctgcttgccatgctagagctgtagcccaataagtatggcttggtgccttgagcaaggtctacatgggcatagagcaggctaggccactaggccagctatgggctacatgctcatgtataccactcaccactcgaaacacatataagacagaaaaatggagggcataccttttggaggagttttacattagctccagcctaagcaaaataaaatgtagtattccatatttttatgattttctatctttcatggtatgccacttttgcatttctacgtatgacaaactcttgtgctcttacattatttgtttcgttgttgcataggaactttagaaattaaagacaagttagccattcttgtaccacacatggtttcatcatgtgaatgtaagcaacatatgccaaattttcttgtctcgacaccgaaatgccttgcccaaactaaatgttgaatcaccccattctatggttattgccactagagggcatcttcggcggcaatctcaccaagcccttcgttatatgcatttctatgttgtgcaagcatgcaataggccgatttgccattatagcgtgtgcactaggtcatgcatgcttatgtctttacaaatttatgatgcttattgtgatctggttctagcaaaagaactttaattagacaacacatcaaatgacaaaaatatcccttgtttagttgattagcacatccatcgaccaattatagaatcacttctaaaatgtcatggtattatagaactgtcaactactacaaactatgtgtcggcgtttcgacaccggggggtccctggaccgacgagtgaattgtcgctgcgtgccccagcccagatgggtcggcgcgagatggaacacaagggggaaaaagggaaccgcggctcgtgttatcctgcgcccagggcggatgcgcttgcagtagggggttacaagcgttcacgagagagggagaaagcctgctcgtcagcccgtcctcccgcgcggccaccctctcgtacgagggccctggaccttccttttatagatgtaaggagagggcccaggtgtacaatggggggtgtagcaatatgctaacgtgtccggcagagaggagccagagccctatgtacatgccgacgtggctgtcggagaggtgttggtgccctgtgcatgtgatgtcgtggccgtcggaggagcgcttgagccctgtagaagcacagctatcggggctgtcgggtccttgctgacgtctccttgcttccgtagggggctgagaaccgccgtcgtcatgggagcacgcggggtgccatcattacttgtttaccggggcgagccagatgggacgccggtcttgttccccgtagcctgagctagctaggggtagggtaatgatgcacccccctgtaacgtggtcggtccgagcccaaggtcgggcgaggcggtgactcctccgaggtcgaggttgaggccaagccctggagtcgggcaaggcggagaccgccttccgaggtcgaggttgagtctgagccctggggtcgggcgaggcggagaccgtcttccgaggtcgaggttgagtccgagccctggggtcgggcgaggcggagaccgtctttcgaagtcgaggttgagtccaagccctggggtcgggcgaggcagagaccgtcttccgaggtcgaggcgggggccaagccctggggtcgggcgaggcggagcttcctatggcgcctgaagctggactcggctgctgtcagcctcaccctagcgggtggcacagcagtcggagcagggcaggtggcgttgtttttgagagcacctagagggggggtgaataggtgatcctgtaaaacttaaaacttaacaccacaaacttgattaagagttagatcaatgaaatcaagtgagtagagaggagagctcttgtgaagcacaatagacacaataaggacaagcacaagagacacgaggatttatcccgtggttcggccaagtacaaaacttgcctactccacgttgtggcgtcccaacggacgagagttgcactcaactcctctcaagtgatccaatgatcaacttgaataccacggtgttcttctttactttactctttcccgtttgcgaggaatcttcacaacttggagtctctcgcccttacaataataatctcaatgaagcactagagtaagggaggaaagcaacacactcaaatccacagcaaatacgcacacacaagaccaagacttgagcccaaaagagtatcacaagtttctcactagaacggagctcaaatcactaagaaagtcgaacaagtgtgcaagaatgaagtgtgaatgatcaacaatgctcaaaggttgcttggtgtcctcctccatgcgcctaggggtcccttttatagccccaaggcagctaggagccgttgagagcatttcaagaaggcaattcttgccttctgtcgcctggcgcaccggacagtccggtgcaccaccggacactgtccggtgcggatttctttccttatttggcgaagccgaccgttgcagattcctagccgttggcgcaccagacactatccgatgcacaccggacagtccggtgccccttctgaccgttggctcttgccacgcgtcgcacgcggattatgcggccgaccgttggcccggccgactgttggctcactggacagtccggtgcaccatcggacagtccggtgatttttcgccgtacgccgttaattgcttcccgagagcagccagttgacagccaccggcctggcgcaccagacactgtccggtgcaccaccggacagtccggtgcacccagaccgagttgtctttggctgaacaaagccatctcttttccaacttgatttctcctgtttccagcacttagacacaatacattagtctccaaaacaatgtactaagtcttagaaacatacctttttacttgatttgcactttgtccatcactttgcatggattaacataagtccacttgcgttggcactcaatcaccaaaatacttagaaatggcccaagggcacatttccctttcaatctccccctttttggtgatttatgccaacacaataaaaagcaactaaaggaagtgcaacatcaatacaaattagaactcaaaattgttttgattcaaatttggtatatatggatcattctttgccaccacttgtttgtttttgcaaatcaaactcaatttcctatctctaagtcaaacacacttgttgaaatataaagagtgatatttcaagagaaattgatcaaagattaaaaaaactccccctttttccataatcaagccttctccccacaagagaccaatgttttgacaataagagacaaacaagagtatttagacaaacaaaaactctaactctacttttcaaaattctcaagtggtagctgatccatttattgctttggccttattttctccccctttggcatcaaacaccaaaacgggatcaatcttggccctttaaccccattgcctcaccaaaatcttcaactaagagtaaaaaggcaataagaggacaaagatgaacttggaatcagttactcgttcatcggagtgcagtggaagtcttgcatggtccaagtccaccttttacctttcaaacctcatttgagactaagttaagcaaactcaagcacacagttagtctcaaggggtcaagttgtagcacatctccccctaaatatgtgcatcacttgcaaatggacttgtgaggtccggggagtgcttgtacaacttgagcaccataaataaacaacaaaatgcattaaggaacgtgatcaaggcataaaacacatgtatgctataaatcaatccaggttccgcgaatctaagacatttagctcactacgcagcttgcaaaaggtcgactcatctagaggcttggcaaagatatcagctagctggttctcggtgctaacatgaaacacttcgatatctcccttttgctggtggtctctcaaaaagtgatgctggatgtcaatgtgctttgtgcggctgtgctccacaggattatccgccatgcggataacactctcattatcacataggagtgggactttgctcagattgtagccaaagtccctgagggtttgcctcatccaaagtagttgcgagcaacactgtcctgcggcaacatactcggcctcagcggtggatagggcaacaaaagtttgtttcttagagctccacgacaccagggaccttcctaagaattgacacgtccccgatgtactcttcctatcgaccttacatccagcgtaatcggagtctaaatatccaattaagtcaaaggtagacccctttggatactagatcccgaagcaaggcgtagcgactaaatatctaagaattcgcttcacggccactaagtgacactcccttggatcggattgaaatctagcacacatgcatacgctaagcataatatccggtctactagcacataaataaagtaaggaccctatcatagaccggtatgccttttgatcaacggacttacctcctttgtttaggtcggtgtgtccgtcggttcccattggagtctttgcgggcttggcgtccttcatcccaaaccgcttgatcaagtcttgcgtgtacttcgtttgggagatgaaggtcccatccttgagttgcttcacttggaatccaaggaaatagcttaactcgcccatcatcgacatctcaaacttttgagtcatcaccttgctaaactcttcacaagacttttggttagtagaaccaaatattatgtcatcgacataaatttggcacacaaataagtcaccatcacaagtcttagtaaaaagagttgggtcggctttcccaaccttgaaagcattagcaattaaaaagtctctaaggcattcataccatgctcttggggcttgcttaagtccatagagcgccttagagagcttacacacgtggtcggggtaccgttcatcctcgaagccagggggttgctccacgtacacctcctccttgattggcccgttgaggaaagcgctcttcacatccatttggaacaacctgaaagaatggtgagtagcataagctaacaatattcgaattgactctagcctagccacaggagcaaaagtctcctcaaagtccaaacctgcgacctgggcataaccttttgccacaagtcgtgccttgttccttgtcaccactccgtgctcgtcttgtttgttgcggaacacccacttggttccacaacgttttgcttgggacgaggcaccagtgtccaaacttcatttctcttgaagttgttgagctcctcttgcatgaccaacacccagtccagatctagcaaggcctcttctaccctgaaaggctcaatagaagagacaaaggagtaatgctcacaaaaattaactaatctagaacgagtagttactcccttgcttatgtcacccaatatttggtcgacgggatgattcctttgaatcgtcgctcgaacttgggttggaggtgccggttgcgcttcttcctctatcacatgaacatcttgtgctcccccttgatcacacgcctcttcttgatgaacctgttcatcttcttgagttgggggatgcaccattattgaggaagaaggttgatcttgctccttttgttccagtggcctcacatctccaaccgccatggtgcgcattgcagccgttggaacgtcttcttcatctacatcatcaagatcaacaacttgctctcttggagagccattagtctcatcaaatacaacgtcgctagagacttcaaccaaacccgatgatttgttgaagaccctatacgcctttgtatttgagtcataacctaataaaaacccttctacagctttgggagcaaacttagaattcctacctttcttcactagaatgtaacatttgctcccaaatacacgaaagtaagacacatttggtttgttaccggttagaagctcatatgaagtcttcttgaggaggcgatgaaggtagactcggtttatggcgtggcaagccgtgctcacggcttccgtccaaaaccgttcgggcgtcttgaattcaccaagcatcgtcctcgccatgtctagaagcgtcctgttcttcctctctaccacaccattttgctgtggtgtgtagggagcggagaactcgtgcttgattccttcctcctcaagatactcctctacttgaaggttcttgaactcagacccattgttgctccttatcttcttcactttgagctcaaattcattttgggctctccttaggaagcgcttgagggtcccttgggtctcagatttatcctgcaaaaagaatacccaagtgaagcgggaaaaatcatcaactataacaagaccatacttacttcctcctatacttagataggcgacgggtctgaagagatccatatgaagtaactccaggggtcttgatgttgtcatcacatttttggcatgatgagagcttcccacctgtttacctacttgacaagctgcacaaggtctatctttttcgaaagttacattagttagacctatcacgtgttctccctttagaagcttgtgaaggttcttcatccccacatgtgctaaacgacgatgccacagccagcccatgctagtcttagcaattaagcatgcatctagaccggcctcctcttttgcaaaatcaactaaatagagtttgccgtctagtgcacccttaaaagctaatgaaccatcacttcttctaaagacagacacatctacatttgtgaataaacagttatatcccatattacaaagttgactcacagacaacaagttatatccaagcgactcaactaagaacacattagaaatatagtgctcagatgaaatagcaatttttcctaaccctttcaccttgccttggttcccatcaccgaatatgattgaatcttggggatccttgttcttgacgtaggaagagaacatcctcttttcccccgtcatgtggtttgtgcatccgctgtcgataatccagcttgagcccccggatgcataaacctgcaaggcaaatttaggcttgggtcttaggtacccaactcttgttgggtcctacaaggttagtacaaatagctttagagacccaaatgcaagttttatctcccttgcattttgcccctaattttctagcaactaccttcttatcctttctacagatagcaaaggaagcatttaaagcatgataaattgtagaaggttcattcattactttcctaggaacatgaacaatatttcttctaggcacatgagcatttctcataggcacatgatgaatgacatttttcctagccaaacttctatcatacatcatagaagaacttgaagcaaacattgcatttgaatcataagcatgtgaaacaatatcattgcaacttctatcatgatgaacattcctagaatatctcctatcatggtataagaaagcatggttcttttgcaaacattttgccataggggccttccctttctccttgatggagatgggagccttatgactcgtcaagttcttgacttccctcttgaagccaagaccatccttaattgaggggtgtctaccaatcgtgtaggcatcccttgcaaattttagtttgtcaaattcactcttgctagtcttaagttgggcattaagactagccacttcatcattcaatttagaaattgaaactaggtgtttattacaagcatcaacattaaaatctttacacctagtgcaaactacaacatgttctacacaagatgttgacttgttagctatttctaacttagcactcaaatcatcatttatgctctttaaactagaaatagagtcatgacatgtagacaattcataagaaagcatttcattcctttttatttctaaagcaagggatttttgtgcctctacaaacttatcatgttcttcatacacaagatcctctttcttttctaataacctatttttatcattcaaggcatcaattaattcattaattttatcaaccttagttctatctaggcccttgaataaacatgaatagtctatttcatcatcactagattcttcatcacttgaggaagcgtaagtactagtatctcgagtgcttaccttcttttcccttgccatgaggcaggtgtgatgctcattggggaagagggtcgacttgttgaaggtggtggcggcgagtcctttgttgtcagagtcggacgacgaacaatccgagtcccactcctttccaaggtgtgcctcgcccttagcctttttgtaagccttcttcttttccttcttgttcccttgttcctggtcactatcattatcgggacaattagcgataaagtgaccaatcttaccacatttgaagcatgaacgcttcccctttgttttggtcttgttgggatgctccttgctaccccttagcgccgtcttgaaacgcttgatgatgagggccatctcttcctcattgagccccgccgcctcaacttgtgccaccttgctaggtagcgcctccttgctcctcgttgctttgagagccacggtttgaggctcgtggattgggccgttcaacgcatcgtcaacgtatcttgtctccttgatcatcatccgcccgcttacgaactttccaagtatcttctcgggcgtcatcttggtgtacctaggattctcacgaatattgttcacaatatgtggatcaaggacagtgaaagaccttagcattaggcagactacgtcgtggtccgtccatcgcgtgcttccatagctccttattttgttgacgagggtcttgagccggttgtacgtttgggttggctcctcgcccctgatcattgcgaatctcccaagttctccctccaccaactccattttggtgagcatggtgacatcgttcccctcatgtgagattttgagggtgtcccaaatcttcttggcgttatccaagccgctcaccttatgctattcatccctgcacaatgaagctagaagaacagtagtagcttgtgcatttttgtgaatttgctcattgataaatatgggactatcagtactatcaaattgcattccactctctactatctcccatatgcttggatggaaagagaacaagtgactacgcattttgtgactccaaaatccgtagtcctctccatcaaagtgaggaggtttaccaagtggaatggagagtaaatgagcatttgtattttgcggaatgcgagaataatcaaaagaaaagtttgaattgactgttttctttttctcgtagttgtcgtcgtccttttgggaagaagaggactcgtcgttgtcgtcatagtagacgatctccttgatgcgtcttgttttcttcttcttcccgtcttttcttttgtggcttgagcccgagtcagtaggcttgtcatcttttggatcattgacgaaggactccttctccttatcattgaccaccatcccctttcccttaggatccatctcttcgggcgattagtccctttcttgaagagaacgactctgataccaattgagagcacctagagggggggggggtgaataggtgatcctgtaaaacttaaaacttaacaccacaaacttgattaagagttagatcaatgaaatcaagtgagtagagaggagagctcttgtgaagcacaatagacacaataaggacaagcacaagagacacgaggatttatcccgtggttcggccaagtacaaaacttgcctactccacgttgtggcgtcccaacggacgagagttgcactcaactcctctcaagtgatccaatgatcaacttgaataccacggtgttcttctttactttactctttcccgtttgcgaggaatctccacaacttggagtctctcgcccttacaataagaatctcaatgaagcactagagtaagggaggaaagcaacacactcaaatccacagcaaatacgcacacacaagaccaagacttgagcccaaaagagtatcacaagtttctcactagaacggagctcaaatcactaagaaagtcgaacaagtgtgcaagaatgaagtgtgaatgatcaacaatgctcaaaggttgcttggtgtcctcctccatgcgcctaggggtcccttttatagccccaaggcagctaggagccgttgagagcatttcaagaaggcaattcttgccttctgtcgcctggcgcaccggacagtccggtgcggatttctttccttatttggcgaagccgaccgttgcagattcctagccgttgccggtgcacaccggacagtccggtgccccttctgaccgttggctcttaacacgcgtcgcgcgcggattatgcggccgaccgttggcccggccgactgttggctcaccggacagtccggtgcaccaccgaacagtccggtgatttatagccgtacgccgttaattgcttcccgagagcagccagttgacagccgccggcctggcgcaccggacactgtccggtgcacccagaccgagctgtctttggctgaacaaagccatctcttttccaacttgatttctcctatttccagcacttagacacaatacattagtctccaaaacaatgtactaagtcttagaaacatacctttttacttgatttgcactttgtccatcactttgcatggattaacataagtccacttgcgttggcactcaatcaccaaaatacttagaaatggcccaagggcacatttccctttcagttttcccgtcaggtcagtcagtgggggggggggcgaagtgactatggtcacttcggccctgccgactgaggaacacacgtgaggataaggtgtcaggcgatccttgcatcaaatgctcctacgatacgatcggttggcgaggcgatctggccaaggttgcttcactgcgaagcctgcccgagctgggcctcgggcgagtcgaaggtgcgcctattgcttgaggaggccctcaggtaaggcgtgaatccgcctgggtctactgtccctgcccgaggctgggctcgggcgaggcgagatcgtgtcccttgagtggacggagccttgacctgaattgcgcccatcaggcttttgcagcttgtgctgatggtgattaccagccgagtttaggagtcttgggggtacccctaattatggtccccgacagtagcccccgagcctcaaagggagtgttggtactcgcttggaggctttgtcgcacttttttgcaaggggaccggcctttctcggttacattttgttccggtgggtgcgcgcgagcgcacccgccgggtgtagcccacgaggcctcggaggagtggtttgactcctccgaggtcttagtgcctttcgtgacgcctcggccggtctggttgttccctcatgcgatctgatcgtagcccgggtgcatggtcaggttccgagttctcggactagtatgttgacactgtcaatggtttggccagagccggtttgcgagagcagcccccgagcctctgcacagagcgagaggacggtcaaggactgactcggcttttatcatacgccccttcgtcgcctttccgcaaggaggaggggggggggaaagcgccatgttgccctcggagggcaccgaacatggtgtctccagtgagttgctaacgggtgatccgagtggacgcccgtgccccgttcgataagggtcggctagtggcccagaggcacgctccaaaagtacctgcaggtgatttgccggacccggtaccgtttgatagggtccaagggctcgatgcctccctctgatgggattccgttacagaatcgctcctgctggtctcaaaaatgtcctagggtacgttgggagcgtagcccgagcctcggccatgtatcggacgtacccagagtcatccctcgctctgcgtgttctggggcggctgtcgaacccttcggggggccagccttcgaacccctgatcagtagtgggcgcggagcccgagtgctctgaggcggctgtcgaacccttccgaggggccagccttcgaacctctgatcagtaatgggcgcggagcccgagtgctctgaggcggctatcgaacccttccgaggggccagccttcgaacctctgatcagtagtgggcgcggagcccgagtgctctgggatggctgtcgaacccttccgaggggccagccttcgaacccctgatcagtaggagggctcggggcccgcttccttcgcggagaaggatccctttcggagtatcccctttcccggtccctgtagcaagagagagaaagggtaagaggaaaaggatacgaaattgaacgatgtggcgcacctttttcgacgcggtcatcatggcggaggtgaagcgtcgcccgcttcgcctgccaaaggtgtcacatgccctgccgcggggttaatgcgatgggacgagtggttcgcggggcagccgttgcgcgagccgttcgaggaacgggcgtttcgccttcgagtttgaatttcgtagcgggttcgggcgaagcattgaacgggtcttgcccgggcctttatatatccagaagagggaccggtggtggctctttactctgctgctcgcctcttgctttggtttccacaacccaagggaatagccagagaaagaaaaccacgcaccttgtccgctccgccgccaccccattcgcttggcgatggccgaccgggtaaccgtcgttccgccgcgcgacccgtggcctttctccatcgtcacggtggacaacctggaggccattgttgccgatggcttgctccgtcccctctctggtgacccacaaccggagtggatggtccctccgagcggggccaccccgaccccgccgccagggtatgtgctgagtttcgtctccttccatgagcgggggttcggagtgccagcaagtcgtttcatgcgggcactcctgaattattacggggtggagctgcacaatctcaaccccaactccatcgcgcaagcagccatcttcgcggcggtttgcgaaggatttttggggattgacccccactgggatctgtggacccatctcttctccacggagccttttgccctgacgatgaggaaaaagagggtccgcatggcggtgcgggccggtggctacatcctctagttgaggcaggcgcgcgcgcaatagtacatccccaccatccttgtgtcttcgaacaaggggtggcagcgccggtggttttacctccggaatgatgatgcgaggctcccgtcgttttctcaacgagtggtgactgtagccggtagcaactggcgctatggggccgcgcgcgagaaacagaagaatctctagccccttctggaggccttgcaggagctgcgagacggagggcttaccgccgcgggggtggtcgctgccatccatcgccggagggtgcttcccttgacagagcggcggttgctgctttcgaagatggtgccgggggtcgacttggagggttcgcagatgtccttggtccccctctccgccgatgacctccacaggtgggtatctggcacggtagggaggctggacgccggcgcccttacccagcccttgatgcgtcccgagtgcgggtgcatgtccctggtgagtgtccgctccttcttctttcttgtgtcagattgcccttggttctcacagtcgagatttccgtccgtctctaggagttggggtgtcacaagctttccctgccaccggtcccggaggacgtggtggaccgagccgcgtggagggtcgctgcgaagaagaagaaggagaagaaggacacgaaaaaggctcgggctcgcgagcggatgtgggctcgggacgccttggagaggcaccatcggaggcaggagagggacgggctcccgagggagccgtcgctagagacgccttacgacgatgacgacgatgatgatgacgaagacgacgacatgacaacccgccttagcctcagcccggatctgaggctgggctaggggtcgtcgagccagcccccaagtgggctggcaccgtcggtatctggggctgggacatcagggtcccggtccgaagaacaggggcaggctcagggggtacttgaccccttggccgaggtagttgaggtgaccccggggagttaggccgacccgcctgtcccccaagagccgtcgcccgtgccggccgcacaggaggttgatcctcaggtcgtcgtgactgcgcctgggcggaccgtcccttcggcgccccaggcacccgaggcggggatggtgccgaagccgacagcggggaaaacctcggcagtgcccgtggggaccgagacccaaggggcctccccgcaggcacaattggccttggtccggagtgggtaagtatctgaggatgcctctatcctggctcctccttcgtgtgtcctgatcctgcttttccttttcctcccagcaaacggaggcacggttcggccagtctggctccctggaaggcccttaagacggtgccggcttctgcagctggtgccgcaccgggccacgccggtcggctggcctccacacaagatgccccaaagtggggggctcaggcggcatgagttgccgtggggcgagctccccaggctgacccctctgtcgaggcggccgtcgtgccgagggagactgctggtgcggccgcggccgcggccttgagcccacctgacgtgttgccggcgccggcaccagcttctgccgaggctgttgccgttctgcccgtggagccacccgtcgccgtcgatgctgagatggttgaggcgccgctactcgaggtatccgatgcgccgaccgcagggggtcccgacgccttggaggaggggggcgcagaaccgcggcccgtcctggggagtggtgaccttatcctcgcgcgacgcaatcccaatgagcggcgtgggcaggcgctccggttctggacccgtggtgcctcgaaacccctcttcgttcttgacgatgagcgggaggagcagtcttgggacaagctgcatgagtgtgccgaggcagcgatggggtcgcttcggtcgaccgtggaggtcctttcgaggaatgttcccaagatcctccaggtaaggatttcaggcatacctttcacgtgaccagggcattctttgtgacgccttgcttcccttcctcaggatttgacgggtctgagtaccgccaagtcgtcgttcatccgccgcgaggccgacgtctggggttcgctgcggttcctgagggccgcgcttgccgaggctaccgagtgcctcccccaacggagcgctgaggcggcggaccttcggttgctctgtgatgagctgggggtggaggcagcggcggcacgcgcagaggcgcagcggcggcagttggagcttggccaggtcatcggtgagcgggaccaatctcggagctaggctgccgaggctgaaagccaggctgaggcccttgggggccagctagccgaggcgtctgcttgggccggagcccttgcggtggacctggtcgtggctgtcgggtatgctcagtccgcccaagccgcagcctcggagcagcgtgcccgggctgaaggtatatcttggccactttgagacttcgattcagcttcattcttcaactcgtgtctgaagaattaagttttggctgtttgcagagttcgagctagccctcaacgagtccgccaaggcacttgcccaggtggctaagcagaaggaggccgaccgcatggccatgtccgaagctatctcggccttctgccaggtctttggtcttgacgacgtcccctcgagaagctcccccagagccgcctgcaggccttgggcggccatgtgcgcggcagactccgcgaggcgctgcatcacggcgttaggcgggccttcgccgtgctcgcttcccactacaatgtggatctggagcgggtcagcgaggggtaccgtcttcccgacgaagatgaagctgccctggccgaagttcagaggcttgacgcggccgtcgcgggcccaagcgcggtgctggcgtcctccttcgaggtggaaatccttccacttgcatcaccgtccaagaccggggcggatctcgccgagggtggaaacggtgctgagggtggagacgaagccgagggtgctgctcctcccccgggcgatgcctgattctgccggagcagtttgttttgaacatgcttgtgtttttcgcggccgccgaggcctgaacactttgtcgtcatgttataaagctgcatttcttttcctcctgtttcgagtatccggacttgtccgtcagtagcagaatcgcttatctgagtaagagttagtttttgcggaaggtgacgagtgaggtaaccgtatcccggaggcgtaggagtccctcggctcggtctgccttgccgctttcatgcgctcttattcatttcgcggggctctgttactgatatagccgagaaacacgaaagtcgttttggtagaaaagttttcgagcgttaagacttgttcggtcagcagaatcgcttatccgagcgtgagttacttatcgcaaaaggtgatgagtgaggtatccgtatcccggaggcgtaggagtccctcggctcggtcagccttgccgcttacgtgtactccgtcgttttcaggatcccactatcgaagtagtcgaaaagcgcgaaagatgttctggcagaaagaccttttccgaggaaaaatttgaaaatttttgacgcagagggtttcccccttctagcccccgagggagggtcgggctttgccgaggcaaggtgacccttccttgacggttagactctatttgtgtatgtaaagataacgaggtatatgaacgacttgaaaacatcttaagggtaaaagcgacgtagctgtcagatgttccaagcgttgctgtagacctcgccatgactgttggccagcttgtatgttccgggcttcaaaatattagcgatgatgaacggcccttctcagggaggtgtgagcttgtggcgtcctcgggcatcttgtcatagccgaagcaccaagtccgccacctggaggtctcgggaccgaacccctcgggcgtggtagcgtcgcagagactgctgataccgtgtcgagtgtagtaaggccatgtcccgagcctcttctagttggtccagtgagtcttctcggctggtctggttgcttcggtcgttgtacgcccttgtcctcgaggagccgtattctaagtctgtgggcaagatagcctcgaccccatagactagaaaaaacggcgtgaagcctgtggcttggcttgccgtcgtcctcagactccagaccaccgaggggagttccttcatccattgcctgtcgaacttgttgaggtcgttgtagatccttgacttaagtccctgcagaatcatgccgttggcacgctctacctgcccattcatcatggggtgagctacggcggcccagtccacccggatgtggtggtcctcgcagaagtccaggaacttcctgccagtgaactaggtgccgttgtcggtgatgatggaattcgggaccccaaagcgatggatgatgttggtgaagaacgccaccacttgctcggacctaatgctgtttaggggtcggacctcgatccacttggagaatttgtcgatggcgaccagcaggtgcgtgaagcccccgggtgccttctgcaagggaccgacgaggtccagaccccacatagcaaacgaccaggtgatgggtattctttgtagggcctgagcgggtaggtgtgtctgccttgcgtagaattgacacccttggcaggtgcgtacaatcctagtggcgtcggccaccgcggtcggccagtagaaaccctgtcggaaggtgtttccaacgagggcttgaggcgctgcgtggtgaccgcaagcccccgagtgtatttcttgcaatagctcctgaccttcggtgatggatatgcatcgctggaggatgcctgaggggctgtggtggtagagctccttcttgttacccagcaagacaaacgacttggcgcgtcgtgccagtcgccgagcttcggctctgtcgaggggtagctctcctcggtggagatattgcaggtacggggtctgccagtttcaattaggcgtgaccccattccgctctttctcgatgcgcagtgcctcaccctcggcgaccgagggtgcctcaggctgggccgaggcctccccgggcttgggcgtgtcgtcggtcttgacggagggttgatgtaggtttcaggagaagatgtccgggggaaccgttgtccatcccgaggctaccttagccagctcgtccacagtctcgttgtaccgtcgagcgatgtggttgagcttgagcccgtagaacttgtcttccaggcgccgaacctcgtcgcagtaggcctccatcttcgggtcgcggcattgggagttcttcatgacttggtcgatgacaagctgcgagtcgccacgagcgtcgaggcaccgaacccctagctcgatggcgatgtgcaacccgttaaccagagcctcgtactcggccatgttgtttgacgccgggaaatggaggcgcagcacgtagcggaggtgctttccgaggggtgagatgaagagtaggcccgcacccgctcctgttttcatcatcgacccgtcgaaatacatggtctagagttctggttggatcggagctgctggaagctgggtgtcgacccattcagccacaaagtccgccaagacttgggacttgatggccttccgaggagcgaacgagattgtcttgcccatgatctccaccgcccactttgcaatcctacccgaggcctctcgacactggatgatctccccctgggggaaggctgacaccacagtcaccggatgagactcaaagtagtgtcgcaactttcgacgcgtcagaattaccgcgtacagtagcttctgaatttgcgggtagcggattttggtctcggacagtacttcactgatgaagtagaccggcctttggacgagcaatgcatgcccttcttcttgcctctcgactacgattgcggcgctgaccacctaagtggttgcggctacgtagatcaagagggcttctcccgcagcgggggggcaccaggatgggcacacttgtaaggagcgcctttaagttcctgagggcttcctcggcctcgggggtccaagtgaagcgctcggtcttccttaagaggcggtacaggggtaggcctctttcgccgaggcgcgagatgaagcggctcagagccgcaaggcatcccatgaccctctgtactcctttcaagtccttgataggccccatgttggtgatggccgcgattttctccgggttggcctcgatgccccgctcggagacgatgaaccccaggagaatgcctcgggggactccgaagacacacttctcgggattgagttttatgcctttcgccttgagacacttgaatgtcgtttcaaggtcagtgaggaggtcggaggctttcctcgtcttgactatgatgtcatcgacgtaagcctcgaccgttcggccaatgtgctctccgaacacatggttcatgcacctttggtatgtcgcgcctgcattccttaaaccgaatggcatagtaatatagcagtacatgccaaagggtgtgatgaaagaggttgcgagctggtcggactctttcatcctgatttggtgataccctgagtaggcatcgaggaatgacagggtttcgcacccagcagtggaatccacgatttgatcgatgcgaggcagagggtagggaaccttcggacatgctttgtttagaccactgtagtctacacacatcctccatttcacacctttctttttcacaagcacagggttggctagccattcgggatggaatacctctttgatgaaccctgcagccatcagcttgtggatctccttgcctatggctctgtgcttttcttcgtcgaatcggcgcagaggctgcttcacgggtcaggctccagctcggatatccagcgagtgctcgatgacatccctcggtatgccaggcatgtccgagggactccacgcaaaaacctcggcattcgcgcggagaaagtcgatgagcactacttcctatttgggtcgagctcggagccgatccggacttgcttggaggcgtcgttgctagggtcgagagggatggacttaaccgcctctgctagctcaaagttgccagcatggcgcttcgcatctggcacctccttggagaggctcttcaggtcggtgttgagggcctcggattcggtgagggcctcagcgtactccacgcactccacgtcgcattcgtacgcgtgtcggtacgtggatccgacggtgatgaccccgttggggcccgacatcttgagcttgaggtaggtgtagttggggacgaccatgaacttggcgtagcatggtctccccagcactgcgtggtaggttcctcggaacccgaccacctcgaacgtgagggtttcctttcagaagttggagggagtcccgaagcagacgggcagatcgagttgcccaaggggctggacgcgcttcccggggatgatcccgtgaaagggcgccgcaccggcccggatcgtggacagatcgatctgcaagagcccgagggtctcggcgtagatgatgttgaggctgctgcctccatccatgaggaccttggtaagcctgacgttgccgatgacgggatcgacaatgagcgggtactttcctgggctcggcacgtggtcggggtggtcgccttggtcgaaggtgatgggcttgtcggaccagtctaggtagactggcgccaccaccttcaccgagcagacctcccggcgctcctgcttgcggtgccgagccgaggcattcgccacttgcccaccgtagatcatgaagcagtcatggacctcggggaactcctctgctttgtggccctccttcttgtcattgtcgtgggctctgtcaccttccgccgtgggcccgaccttatgaagtagcgctgaagcatgacgcactcctcaagggtgtgcttcacgggaccctgatgataggggcatgactccttgagcatcttgtcgaacaggttggcccctccgggaggcttccgagggttcctgtgctcggcggcggcgacaagatctgcgtcggcggcgtcgcgtttcgcttgcgacttcttcttgcccttcttgttcgtgccgcgctgagcggacgcctcggggacgtcttcctgctggcgtccctgaggctgcttgtcctttcggaagatggcctcgaccacctcctgaccagaggcgaacaggtcgcggcaagtggtgccgacgaggaacgcgccaatgacatctgagtcggtgatgttgggcagctcggtgcgctgcttcgaaaatcaccggatgtagtcccgcagggattctcctggctgctggcggcagcttcggagatcccaggagttcctagggcacacgtatgtgccctggaagtttccggcgaaggctttaaccaggtcatcccagttggagatctgcgcaggaggcagatgctctagccaggctcgggcggcgtcagagaggaacagggggaggttgtggatgatgaggttgtcatcgtctgttccacccagctggcaggccagccggtagtccgcgagccaaagttccggccttgtttcccccaagtacttagtgatggtagtcgaggctcggaaccgggtcgggaacgacgcccgtcgtatggcccggctgaaagcttgcagaccgggtggtttgggtgaggggctctgatgctccccgctatcatagcgtcccccacgcttggggtggtagtctcggcgcaccttctcgtcgaggtgggctcgacggttgcggcggtagtgctcgttgctgaggcgacccggtgtggaccgaggcttcccgcataaatcgggaagtcacggcgcgatgctccggggggtacccctgcctttgggaggcagagctttcggcccgtcggaccgcggcatcctccaggagattcttgagttctccctggatacgccgcccctcggtggtggatggctccagcatcgctcggagtagtattgctgctgcagccaggttctggccgaccccactagaagccgggggcagccttgccctggcatcgtcagcgatgctgtgctggacatcctgggccagatgacgcgcttctccggctggtgctcggcctgcccactcctgcccgatgttctgccggagctgcacaagttgtcctgcttcctcgtcgagcctggcctgcatctcgcggatttgctcgagctgtgtgtcctgaccccccacagggactgggaccacatctagctcccgaaggatgtcaacgcgaggcgcaggcctatggggatcgccgtcctccggcataccaaggtgtttgccttcgtcgagaccctctagatcgacgtggaaacattcgcgacttgggccacagtcctcgtcgtcaaggctgtggccaccatcggagtaatcagagaggtagtagtcacatgcggccatgaagtctcgcatggcactggggttaccgagcctggagaaatcccaaccagagtcgggctcgtcatcttcctcggaacccgggggcccgtaggtcgagacggccgtcagtcggtcccaggttgaccacatatggtaccccggaaggttaggatatgcctttatgaaagcgtccaccaaagcggggtcgcttggtgggtcaaagctgaatctaaaaggcacagggtggaaaacagacggtacctcttgatcgatggatggtgacgaagtcgcgtcggggacggactgcaccgttatctcaggtacgaggctaacacccagcaagtccttcgcgagcgtgctggcgtcatccgtccgcttggggttgacgtgttgcggggaaacgacgctcgtcttcgtctcagacgtgaggtcaacgcccgtcgtgtcccccgctggggcgccgacaccgtcgactcgctcgacagccaacgaggtgccgcctcctgcttggccatggttgccacgcctccttctcttgcggcgaggaaggtgacgggacatacccggatgctgctcttccgccatggggggaagacatcgtcaattccgccgccgtcgggcgggctaacggccgtcgttgtcgcacggtggaggaaggagtaccatgtcgtagctgccgtcgagggacatgaacgtgatactcccgaaacggagcagcgtcccgggctggagaggttattggagactacccatctagagcttgacgggaagctgttcgtcaacacgcagcaggcccctacctggcgcaccaactgtcggtgtttcgaatccgggggtacctggatcgacgagtaaattgtcgctgcatgccccagcccagatgggtcggcgcgagatggaacacaagggggaaaaaagggaaccacgactcgtgttatcctgcgcccagggcggatgcgcttacagtagggggttacaagcgttcgcgagagagggagagagcctgctcatcagcccgtcctcccgcgcggtcaccctctcgtacgagggccctggactttccttttatagatgtaaggagagggcccaggtgtacaacggggggtgtagcaatatgctaacgtgtccggcagagaggagccagagccctatgtacatgccgacgtggctgtcggagaggtgttggtgccctgtgcatgtgatgtcatggccgtcggaggagcgcttgagccctgtagaagcacagctgtcagggctgtcgggtccttgatgacgtctccttgcttccgtagggggctgagaaccgccgtcgtcatgggagcacgtggggtgccatcattacttgtttaccggggcgagccagatgggacgccggtcttgttccccatagcctgagctagctaggggtagggtaatgatgtaccccctgtaatgtggtcggtccgagcccaaggtcgggcgaggcggtgactcctccgaggtcgaggttgagtccgagccctggggtcgggcgaggcggagaccgtcttccgaggtcgaggttgagtccgagccctggggtcgggcgaggcggagaccgtcttctgaggtcgaggttgagtccgagccctggggttgggcgaggcggagaccgtcttccgaggtcgaggcgggggccgagccctggggtcgggcgaggcggagcttcctatggcgcctgaagctagactcggctgctgtcagcctcaccctggcgggtggcacagcagtcggagcagggcagacggcgctgttttcctgttaggttagtcagtgggggggggggtgaagtgactgtggtcacttcggccctgctgactgaggaacacgcgtcaggataaggtgtcaggcgatccttgcattgaatgctcctgcgatacggtcggttggcgaggcgatctggccaaggttgcttcactgcgaagcctgcccgagttaggcctcgggcgagtcgaaggtgcgcctgttgcttgaggaggccctcgggcgaggcgtgaatccgcctgggcctactgtccctgcccgaggctaggctcgggcgaggcgagatcgtgtcccttgagtggacggagccttgacctgaattgcgtccatcaggcttttgcagcttgtgctgatggtgattaccagccgagtttaggagtcttgggggtacccctaattatggtccccgacactatgaaagcaaaaatggtagtaatactatccatcatgccttggtttcataaattaatagattttgtacctatctagttctagtcatatatatggcatgatgatttcgcctcaatcgcattagtagtccccttcaaaatttggatctgccattacaaagtgataagttgttgtcatatcccttctcgagggagggggctgcaactgttgttagttgtaggggagagaaagggtggtagtggcagctgctggcgctaggagtcagtgttgactagggcacgatgggtgtaggcaaagggagaggagagattgaggagagagcaaccgttcaattcttgcttaagaattgtgggggtattgaaacttccccaaagtcaaacaaaaatatataaaaaataagagaagatatagacaaaatggatttttggaatcacttgacgtcgaaaacaaccatgtaaaagggtagttgctactaaaggatcaagaaaaagacgttggaaatgacattacttttatttagccctacaagtacaatcaagaagcttctataaacaaaactatatttggcaataatcaagcgtgaatatcctttcattatatttgagcataattatatggttaatatcattagttccatgcactcgaagtttccaatgaagtcctgagtcactatgaggaaggaaataatggacatatatctagagaaggacaagttgtgtaccccgttaaaaaattccttgtcgatttagtgcaaccatggacatgtggacatcatgttagaacaacatgtatgtcaccttgcattgcatatgtcggagagtagatctccggccgggtggcggagtgcacccgccctaagtcctgagatgaggaggggcttaggcgtttcgcttgattgatggagagaaggagcagtacacaagaacacacgaggatttagagtggttcgggccgccagagcgtaataccctactccactgtgagatgtattgcttgagggcttgtatgagctagcgagtctgagattgcgtgtgtgtaacgtcgcatgcctccccttttatagctgaaggggggcatgcacaaagggactgggccccgacatgtgggcccagagacataaagaatatagcgcttggatcctctgatatctgttatcgagacaatcttctctgcccgagatctgcgtatccccggcgtaccgaggaggcttcttgcggaagagaagatgagtatagcgcgtcgctcagcacaggcgtactgttcaccagcagacccaacaggcatgctgtctgctggatgaccttgacgccgtctgccagcggatgggacgggtcgcattaaatgttgagggggcacgtcgcctgtcagcgcagtggcaggcggtgcgtcttttacttaataaatgcaggggccgcacgacttctcgtcaggtttggcccggtagcttatgtcatgggccacaagcagcgggtctttgcctgtgcgggaagtggagagcaaggcctgcacacgtgtcagcaccggacccccgcataccccaaggtccttctcgttccggaaccctgtcgggtttcggacctacccgggggctctggaactgtatgtatataggggcccggtgaccctctatgggggtccggccttactgaggcatggtgcctttccttgccacgtggcgccctttggcctgcccatcgggtggagtcaggcgcggtcctccgcacgactaggagacgtcgcatgggtgcgatgcctttatgctgtaggagagggtacccctgatttagggtaccaacagtggcccccggtcccgcctcaggggaggatgcgagcctgtaggtgggaccagagtctgactggtggttggaccgctgcttccgtgcgcctgttgctgcaattactgccagcccgcttatgaccacgccaactatcgtgcctattcccacggctggctgacccatgactgtcgtacttaatggcactgtttggccatgcgcggagctgcctcgagtcgctgcactggttttgaaaaatttaccttttcagaatctgtgacagtcccgagaagataaggcattggcgcaggcggcggtggggtttctttgcacacggtaaccagcgcgccggttacatgacgtgtgggcttgggcccctgagttggaccgccagttgtggtggagctgagggggcgctaagccgtggggcatttgcacgcttcttgcgtggcagttcgcctctttggtcgctggatacggtgaagatgaaggggcgcttaatcgtggggcggttgcatgtcccttgcgcggcagctcgccttcttgaccgctggttgccccagaaatggaggggcgcgtaaccgtggggcagtcgcacgctcctcctttgggttgttttgcatgacatgcggggcctggccccccgtgtcataaggtgagatccttggtgcacgccgggggagacttcacccgtgacgcttcaggggtgtgagtggaggggatctgcctttaaaaaggggtcgatcccccaggcattagacatgcctcgctcctcttgcgaccaccgcgcccttccgccttccgggcctccagatggggtgcgccggtgttctctggagggatccgtgtcaaggtcgtctcttccggcatcttcaccgtcggagagcgtgcgcccgtgtggtgtcgccgatcttgtcttcttcctgccgccattggaggagtgcaaccccatgggggttggcatcctttcgccactattcggcttcaagaactttcatcatgtagcccggctgcagtcccccgccggtggtcatccagaaggatgactaccagccttgtggtggggagaagcaaaccgggttgcggcctccctcctgccctcaacttcaaggatgttcatcatccgtgctggggaggggggggtctcggcctttcgaccctggggggtccctggaccgacgagtaaattgtcgctgtgtgtcccagcccagatgggtcggcgcgagacggaacacaaggggggaaaacagtaaggggaaaccgtggccttcgtgttgtcctgcgcccagggcggatgcgcttgcagtagggggttacaagcgttcgcgagggagagtgagagagagtgcgtcggcccgttctcccgcgcggccacctcctcgtacgagagccctagaccttccttttatagatgtaaggagagggcccaagtgtataatggggggtgtagcaatgtgctaacgtgtctagcaaaggggagccagagccctatgtacatgtcgtcgtggctgtcggagaggtgttgctgccctattcatctgatgtcatggccgtcgaaggagcgcttgagccccgtggaagtacagctatcggggctgtcggatccttgctgacgtctccttgcttccgtaaggggctgagagccgccgtcgtaatggagcacgcggggtgccatcattacttgtttaccggggtgaaccagatgggacgccggtcttgttccccatagcctgagctagctaggagtagggtaatgatggccccccctgcgacgtggtcggtccgagcccgaggtcgggcgaggcggaggctcctccgaggtcgaggctgagtccgggcccgggtgtcgggcgaggcggagaccgtcgtccgaggtcaaggttgagtccgagcccaggggtcgggcgaggcggagaccgccttccggagtcgaggctgagtccgagcttaggggtcgggcgaggcggagaccgccttccggagtcgaggctgagtccgagctcaggggtcgggcgaggcggagaccgcatcttccgaggtcgaggctgagtccgagccctggggtcggtcgaggcggagtccgtcttccgaggtcgaggttgagtccgagccctggggtcgggcgaggcggagtccgtcttccgaggtcgaggttgagtccgagccctggggtcgggcaaggcggagcttcctatggcgcccgaggctggacttagctactgtcggcctcactctggtgagtggcacagcagtcggagcagcgcaggcggcgctgttttcctgtcaggtcagctagtggaggggcgaagtgactgtggtcacttcggccttgtcaactgaggagcatgcatcaggataaggtgtcaggcgatcctcacattgaatgctcctgcgatacggtcggttggcgtagcgatccggccaaggttgcttctccgcgaagcctgcccgagctgggcctcgggtgagtcgaaggtgcgtccgttgcttgaggagaccctcgggcgaggcgtgaatctgccttggtctactgttcctacccaaggctgggctcgggcgaggcgagatcgtgtcccttgagtggacggagccttgaccggaatcgcgcccatcatgcctttgcagctttgtgctgatggggtttaccagctgagattaggagtcttgggggtacccctatttatggtcctcgacagtagccccgagcctcgaagggagtgttagtactcgcttggaggcttttgtcgcacttttttgcaaggggaccggcctttctcggttgcatttcgttccggtgggtgcgcgcgagcgcacccgccgggtgtagccctcgaggcctcggaggagtggtttgactccttcgaggtcttaatgcctttcgtgatgcctcggccggtctggttgttccctcatgcgaactgaacgtagcccgggtgcatagtcaggttccgagttctcgggctggtatgttgacgctgtcaacggtttggccggagccgggtttgtgagagcagcccccgagcctcagcatagagcaagaggacggtcaaggactgactcggcttttttcatacgcccctacgtcgcctttccgcaaggaggaggggggaaagcgccatgttgccctcggagggcgccgaacatggtgtctccagtgagttgctaatgggtgatccgagtggacgcccgtgccccgttcgataagggtcagctagtggcccagaggcgcgctccaaaagtacctgcaggtgatttgccagacccgatccagtttgatagggtccgagggctcgatgcctccctctggtgggattccgttgcagaatcgctcctgctggtctcggaaatgtcctagggtacctcgggagcgtagcccgagcctcggccatgtatcggacgtacccagagtcacccctcgctctgcgtgctctgaggcggctgtcgaacccttcgggggccagcctacgaacccctgatcagtagtgggcgcggagcccgagtggcttgaggcagctgtcgaacccttccgaggggccagccttcgaacccctgaccagtagtgggcgcggagcccgagtgctctgaggcggctgtcgaacccttccgaggggccagccttcgaacctctgatcagtaggagggctcagggcccgcttccttcgtggagaaggatccctttcagagtatcccctttcccggtccctgtagcaagagagagaaaggggaagaaaaaaagggatatgaaattgaacgacgtggcgtaccttttttgacgcggtcatcatggcggaggtgaagcgtcgcctgcttcgcctgccaaaggcgccgcctgtcctgccgcagagttaatgcgacgggacgagtggttcgcggggcagccgttgtgcgtgcgcgagccgttcgaggaacgggtgtttcgcctttgagttttgaatttcgcggcgggttcgggcgaagtgttgaacgggtctcgcctgggcctttatatattcggaagagggaccggtgacggttctttactctactgaccacctcccgcttaggtttccgcaacctgagggaatagccagagaaagaaaaccgcgcaccttgcccgctccgccgccacctcctttgcttggtgatggccgaccgggtggccgtcattctgccgcgcgacccgtggcctttctccactgtcacggtggacgatctggaggcccttgttgccgacggcttgcttcgtcccctctccggtgacccacagtcggagtggattgctccccaagcggagccgccccatccccgccgccggggtatgtgctgagttttgtctctttccacgaccgggggttcggagtgccagcgagtcgtttcatgtgggcgattctgcaattctacggggtggagctgcacaatctcagccccaactccattgcgcaagcagccatcttcgtggcggtttgcgaagagtttttggggattgacccccagtgggatctgtggacccatctcttctccacggagccttttgccttggcgacgggggagaggagagttcgcatggcggtgcgggccggtggctgcatcctccagttgaggcagtcgcgtgcgcaacagtacatccctgccatccttgcatcttcgaacaaggggtggcagcgccggtggttttaccttcggaacgacgattggaggctcccatcgttttctcaacgagtggtgaccactgccggcaccaactggcgctatggggccccacgcgagagacagaagaatctctagccccttctagaggccttgcaggagctgcgagatggagggctcaccgccgcgggggtggttgacgccatccatcgccggagggtgctccccttgatggagcggcgactgccgctttcggagatgatgccgggggttgacttggagggttcacagatgtcctcggtccccctccccgccgatgacctccacaggcgggtagccgacatagtaggaaagctggacgccggtgctcttacccagccctcgatgcgccccgagcgcggatgcatatccctggtgagtgtccgctccttcttcctttttgtgtaaaattgcccctaggttcttacagctgagatttccgtccgtctccaggaggtggggtttcacaagccttttctgccaccggtcccagaggacgcggtggaccgagccgcgcggagggtcgctgcggagaagaagaaggagaagaaggacgcgaaaaaggctcgggcccgcgagcggatgcgggctcggggatgccttggagaggcgtcgtcagcggcaggagagggacgggctcccgagtgagccgtcgccggagacgcctgacgatgacgacgacgacgatgatgacgatgacgatgacatggctgcccgccttggcctcagcccggatctgaggctgggccaggggtcgttgagccagcccccgagtgggctggcgccgtcggtatccggggccgggacatcagggtcccggtccgaagaacaggggtaggccgagggggtacttgaccccttggccgaggtagttgaagtgaccccagggagtcaggccgacccgcctgttccctaggagccgttgcccgtgccgactgcataggaggctgatcctcgggtcatcgtggctgcgcctaggcagtccatccctctggtgcctcgggcgcccgaggcaaggatggtgccgaagccggcagcggggctaacctcggtggtacccgcggggaccgaggctcgaggggcctccccacaggcacgattggtcgtggcccggagtgggtaagtatcttaggatacctttgtcccggctccttcttcgtgtgtcctgatcctgctcttccctttctttccagcaaatggaggcacggttcgaccggtctggctccccgaaaggtcctcaagacggcgtcggcttctgcagccagtgtcgcgccgggcctcgccggccggctggcctcctcgcaagatgccccaaagcggggggctcaggcggcacaagttgccgtggggcgagttcctgaggctgacccctccgtcgaggcggccgtcgtgccgagggaggctgctggcatggccgcggcttcgagcccgccgggcaggttgccggtgccggccatggagccacccgtcgccgccgatgtttagatggccgaggcgccgccacttgaggtcggcgatcgggaacctgcccccttggccgaggaggtacccgatgcgccggctgcaggaggtgccggcgccttggaggagggaggcgcagaaccgtggcccatcctggggagcggtgacattatcctcgtgcggcgaggtcctaatgagcggcgtggggagaggctccggttctagacccgtggtgcttcgcaacccctcctcgttcttgacgatgatcaagaggagcagacttgggacgaacttcgtgagtgtgccgaggcgacggtggggtcgctccggtcgaccctggaggtcctttccagggacgttcccaggatcctccaggtaaggatttcgggcatacctttcatgtgatcaaggcattctttgtgacgccccgcttcccttcctcaggacctgacggatccgagcaccgccaagtcatcgttcattcgtcgcgaggccgacgtctgggtttgctacggttcctgaggaccacgcttgccgagaccaccgagcgcctctcccaacggagtgccaaggcggcagaccttcggttgctctgtgacgagctgggggcagaggcagcagcggcacgcacagaggcgcagcagcagcagttggagcttggccaggtcatcggcgagcgggaccaatctcggggccgggccgccgaggctgaaagccgggctgaggcccttggaggccagctagctgaggcgtctgctcgggccgaggcccttgcggcggacctggccgtggccgtcgggtctgctcagtccgcccaagctgcaacctcggagcagcgtgcccgggccgaaggtatgtcctggctgtttcgagatttcgatttagcttcattcttcaacttgcatttgaagacttctgctttggctgtttgcagggctcgagtctgccctcaacgagtccgccaaggcacttgcccaggcggctgagcagagggaggccgaccacgtggccatgtccgaggctatctcggccttctgccaggtctttggtctcgacgacgtcccctcgggaagctccccttagagtcgcctgcaggccttgggtgaccacgcgcgcggcagactccgcgaggcgctgcatcacggcgttaggcgggccttcgccgtgctcgcttcccactacgatgtagatctggagcgggtcagcgaggggtactgccttcccgacgaagatgaagctgccctggccgaagttcagaggcttgacgcggttgtcgcgggcccaagcgcggtgttggcgtccactttcgaggcggagatccttccgcttgcgccgtcgtccgagggcggggcggatctcgctgagggtggaaaccatgccgagggtgcagctcctccctcgggcgatgcctgattctgtcggagcagtttattttgaatatgtatgtgtctttcgcggtcgccgaggcctgaacactttgtcgtcgtgatataaagctgcgcctcttttcctcctgtttcgcgtatccggactcgttcgttagtagcaggattgcttacccaagtaagagttatttttcgcggtaggtgacaagtgaggtatccgtatcccggaggcataggaatccctcggctcggtcaacctttccacttacatgcactcttattcgtttctcggggttttgttactgatatagccgggaaacacgaaagtcgttttggtggaagacttttttcgaggaaaattttgacgcaaagggggttcgccgcttctagcccccgagggagggtcaggctttgccgaggcaaggctgacccttccttgatggttagactttatttgcgtatgtaaacgaggtatatgaacgacttgaaaacatcttaagggtagaagcgacgtagctgtcggatgttccaagcgttgttgtagacctcgccttgactgttggccagcttgtatgttccgggcttcaaaatcttggcgatgatgaatggcccttcccagggaggcgtgagcttgtggcgccctcgggcgtcttgtcgtagccgaagcaccaagtcgcccacctcgaggtcttgggaccgaacctctcgagcgtggtagcgtcgcagggactgctgatatcgcaccgagtgtagtaaggccatgtcccgagcctcctccagctggtccagtgagtcttctcggttggtccggttgcttcggtcgtcgtatgccctcgtcctcggggatccgtattctaagtctgtgggcaagatagcctcggccccatagactagaaagaacggcgtgaagcccgtggctcggctcggcgtcgttctcaaactccagaccaccgaggggagttccttcgtccatcacctgccgaacttgttgaggtcgttgtagatccgtggcttgagtccttgcagaatcatgccgttagcacgctctacctgcccattcgtcatggggtgagctacggcggcccagtccactcggatgtggtggtcctcgcagaagtccaggaactttctgccagtgaactgggtgtcgttgtcggtgatgatggagttcgggaccccgaagcgatggatgatgttggtgaagaatgccaccgcctgttcggacctgatgctgtttaggggtctgacctcgatccacttggagaatttgtcgatggcgaccagcaggtgcgtgtagccctcgggtgccttctatatgggaccgacgaggtctagaccccacacagtgaacggccaggtgatggatattgtttgtagagcctgagcgggcaggtgggtctgctttgcgtagaattgacacccttggtaggtgcgtacaatcctagtggcgtcggccaccgcggttggccagtagaaaccctgtcggaaggcgtttccaacaagggctcgaggcgctgcgttgtggcagaaccacccgaattattccagcttaagtgcctaagtcacgcctcaggggccgcaacacacttaaatcggaataacccgtcagtccttcagatctagtctgatagagccacttaaccaggatcaaattccacagtctcactcgaaggtgagtcacagaagaaatacaataaaacaggaaacctcaaattaagtgttgaattattacatagatcggagtttttgagtagcaaataagagttcacaaaataaagtgcagcggataatcgatgtcgtcggtatcgaggaaatgggcaaggcctagcccactactcctcgtgctcctctcctgccggagcaacatcccactcgtccgtccaacccggtggcagggtggtaggacaagtcacaccatcaaccatttcctgaatggtacctgcaaaaataatgccacaagcaaggctgagtatactaatactcagctagacttaaccggtgtgaggagtctactcctctacctctagactatgcagctgtttggctgaggggtttggtttgccaaaagcactagctgtttctaaaattaatttttagcttttcaattttctatcctcattaacttagctagatttgctccttctaagcatccatggtgacaagcatttagttcaatcaacaaattatttcatgtaacctcatttcacttcttactcgatgcagtacaaggggtcaagcagtctcattagctgcgagaagcagacgattcgaatcgagttttaaccttgcaaggtaaacctaaacacacggcatgtcagggtactccgaccccacacatgacaaccgtccccatcgattccccgttcgcgtccaggcctcaccgccttggcatacaatgctccactgaccccggctgccgccgtgcagtgaccgcacttgtacccaccatagctagcatgggagacgatgtattaagtgcacattacaatcctacaagcattaagtgtagtaaagtagcatataataatatggttatgcataaaaccggggcttgccttcaattgctggggctgcggggagatcctcaacagcagcctcggaagcttgctcctggtcctcctcttggacagatccttgctcgaggatgagcacgtactctccgtcggcaagattacaatctaatgaatgcaatgcgtaagatacatgcatgatatgataggtgctttagaaattacaacttttgacggtgtatgatctacttgagttaaacaaggttaactttacttatgtaagacccttgggtggtatacttggtaaattgggtcaaactttatctaaggtaagtggtaggtttatttttggggttccactgaattctttttaagccttagtgagaattgataagtactcaagttagacttattggggtgagatttatttcctctttccttttcttttgttctctttaatgttttggagtgggtttgaactacaagttgcttaaataaaattccaaaaattctgtaaaaattacagtggcttggtactggtgtatatttctctgtctcaaaatttggggatcagaaagtgaatagttttctatggacaaaattatcacattttagggcagaagaggtgctttgaactacaactattatttaacagtaggtaattctctaaaacttatttttgctggcttttaggtgctataacatgacttcatacaaatttctagccattaataccttttagttattttactatggttttctcaagtttctagccaaataggtgctttctaccaccactatatttgaaaaatatcaaacaacagagttcttatttttcttagttattgttttgtgcaagagcaatcattctgaagtttggcatctttttgcttagaggaaggggtggtatgcattatttggattaagtggcctttctcataattcattagcaataggtatgagtttgctcctttttcatgggtttgcatttttctctggtggtttatctcattatggacttagcaaatttttggttgcccattattacatcattaggggttgttcatgatttatttggaaaatgcctcattatcattttatatttattttccttacttaaaatgttgggctgaggtgttcattatttttgcagtagggctctggtggttgtaagtccactgaatttttattatccattttgggtatagttttgtaattctaataattgattttcagttcaaataaggctaaataaaacactttaatttaaaactgatctggactaatggtctctttatttttcctaggttctttgttacttaagtaaactaggaaaaattattctactcactgttcattaatttctaatgcctttctgagttttcctaagttttgggcaaaatagctttaaatgaaaatctacactatattcttcaacactggggttcctactatttttaaacagtgcttaagtgaggtttgaacatctacaaattttcctaggttcagcacagaagaaaaactaattttccttaattaaacaaggttgggtcagtttctgtttttaattttaaactctaaaatttagaacagaaagcctaaggtttatcatttttaaatgatagctcataatatttaggatctagcaaaattagtttgacaacttttgattaagaattcatcaagttatggattttctaagttctctggttatttaaaaagattaacagaattgattaaatggaaaactactttgcactggggtccctggcgggtgttttaagttttcttcgcggatcagtccctgggctactattcaaatgagtcactgacgttacagaaaacccctcgggttcttctaatcctaacccgaggtccttctccaaacttaaacagtaaccgcggtggaagaaagggcggaggggcttaccggcggcgagattgcttcggtgaagtggtcgaggacgtaggggaggtcttagggatcacaacggtgtgcgggtcgccgtcggggatggtcggagttggccggtccacgtgcgcaggcggggatgctcggcggcgacgaggagtccggcctgctcacggcgagatagttcaattgaatgggtcagagagcttcacgggattccagagaagatgtgggtgcaaggaattggacaaagactcactggttagctctgtccacgcgcgacggcggaagaccgaagtccggtgaagtcgatctcgggcttccggtgaagtccggcctggtccgagggcttggaaagcttcacgggccactagcggagcttaccaaagcactggctcgacttgggggtggctggagtgggctggccacggtggccaaagctctggcggcaatggcgggcggaaatgagctcgcaggagctaaggaggggtggctggccggtgatggtgagcgcggggtgaagtgaggcgtgcccggggaggctttataggcgcgggcgagcacggccgagggcggggctctgacaagcgctcggggcgtgcgcggcgaacgccagtgcgcgctctagcaactggcacagcgtcgagcacgaggcagcgcagagagaggtcaagttcaagcgcggattgggcccaaatctttgagattatggccatgatcccgttgagaaatctcttcctctcaggttcctttgtcgcttgtgtgtggaggctagcaagtttcgctaactggattaagagatagagaggggagaaatcctgtttgtctcactgccacacacagggagaagatctctggtttgacatgtccgaggcacgcgtcccaatgccatctcctggcacatgacagaggggttagttaggcacatttttgttaatggggccattaggattcgagttagggatcaaggtgaacatccttgatctttggctcaaggtctgaatttcagaattctgaaattcagaattcccattaagtccccacatgagaagcttgatttggggttttatttgagttgttttggccaagctttctcaacctttcttgttgcttattaaatatacttcaatgtttataattggctcaagccatgattttaaatttttcatacccttttccttattttcttgaattttgctcttggggctcacttagggttttcattagggttgcaacattattacctttttgaaagacccatttgttttgatcatgatacttttaagtatatgattggtggattctttgctcttaagttaatttgatgctcatgcttactttggttcacataaaatgatggttcttggtttggcattttaagagaaaccctaggtgacactggggtgtcacagccttccccccttaaagaaatctcgtcccgagattcgggccagagtccttccagggtgaagcgaagggtgagactcaaaggaaatgggtgattattgttattattagggtaaaactgctcttcgaatgtcattctctttgcaacttcagaaggaagccctttttaagttttacttcatagttacttcattctgaattaagatcatatttttgaaaatttgtttcgaagggcaggggaggggttgggtgtgattacgtaccagcttccttaggtaggcaatcggggaagttggatctcaagaattcctcggtttcccaagtagcttcttcctctgagtgattactccactggaccttgtacatcttgatcgatttagcccgagttgatctttccttgcaatccagaatcttggaggggtactcttggtatgatagatctggctctatctccaattctggctctgctatgatctcggtcggcaatcgaacacacttcttcagctgagatacatggaatacactgtgaatggcagacatctttgaaggtaacttcagcttatatgccacgggtccacatgcttctatgatctcataaggtccaatgtaacgaggggctagcttgcctttgatcccaaacctctacactcccttggtgggtgataccttaaggtatacaaaacttcccacctcgaactggagaggtttccttcttctatcatggtaactcttctgcctggcctgagcagcttctagattcttcttgattagtttgaccttcctttcggcttcagtcactaagtcaggtccaaaaactcctctttctccaggttgagaccaattgagtggtgtcctacaccttcttccatagagagcttcaaaaggtgccatccttaggctggattgataactattgttataagcaaactcttccaaggagaggtgcttatcccaattcttgccacaatcgattgcacaagctctcagcatatcctccagaatttggtttaccctttccgtctaaccatcagtctgtgggtggtaagctgaactcctgattagcttggttcccaaagactcttgcaattgttcccaaaatctggcaacaaattaggctcctcggtcagaaacaatggtccgaggtaatccgtgcaaacacacgatccagtcaatatacaattctgcatacttctgagccttatcagtggtgtgcacaggaagaaaatgtgccactttcgttagtcggtccacaataacccaaatcgaatcatgatgacgagaggtgttgggcagacccacaatgaaatccatgctgatgtcatcccacttccacgaaggtatagacaggggttgcaaagctccagctgatttcaagtggcttgcctttatcctctgacaggtgtcacattctgatacgtactgggctatctccctcttcattctggtccaccaatacaaaggcttcaggtcatggtacatcttggtgcttcccggatgcatagagaatttggagagatgagcctcgtccaaaattttcctcttgagttcctggtctctaggaatcaccaatctgcttttgaaccataacacacccttttcatcttggcagaaacaattatacttctcaaccttctgatggagattcttcttgataatttgcactcccttgtcactgagctaggccatgataatctggtcttgcaaagctggctcaacagaaatgtgagacaaagaaccagaaggaatcacctcaatttgcatcttgctcaactcatcacacaagatgttaatgcgagaatccatcagaatacaattgcattgcaacttccgactcaaggcatctgctaccacattagcttttcctgggtgataatgtacctccaggtcataatccttaatcagctctagccatcttctctgcctcatgttgagatcagcctgagtaaagatgtacttaaggctcttatgatcagtgaagatgttgcagtgggttcccattagatagtgcctccacatttttaatgcatgaaccactgctgccaactcgaggtcatgagtgggatagttttgctcatgaggcctgagtgctcttgaggcataagcgatgactcggttgtcttgcatcaagacacaacctagcccggtgccagaggcatcgcaatatacatcaaaaggcttgctgttgtcgggttgcgccaatactggtgctgtggtcagatgctgccttaatgcatggaaggcatctttgcacttctgactccaaacaaatttggcctctttcttcagcaactcagttataggcttcgcaattcgagagaagtccggaataaatcttcggtaataaccagctaatcccagaaaactccaaatctgacggacaattgttggtggcttccagttcatcacctcttgcactttatcaggatcaacagctattccagcctgagagatagtgtgacccaagaatttgattccctttagccaaaaatcacacttggataacttggcataaaggtggtgctctcacagacgttgaagcactacatgcaaatgcccggcatgttcttcttcgttctttgagtacaccaaaatatcatcgatgaaaaccactacgaacttgtccaattcaggcatgaaaacagaattcatcagatacatgaaatatgctggtgcatttgtcagcccgaaagacatcaccaaaaattcatatagcccatatctggttgagaatgccgtcttcggaatatcacttgctcgtatcttgatctgatggtagccagaacgaaggtctatcttggaaaacaccttggccccgactaactggtcaaaaagaacatcaatacgaggcaaaggatacttgttcttgatagttaccgcattaagagggcggtaatctatacacagtctcaagctttcatccttcttcttcacaaacagtgctggacatccccaaggcgaagtgcttgggcgaataaatcccttatccagcaactcttgcaattgcttcttcaattctgccaactcagcgggtggcattcggtagggcctcttggaaattggtgtcgttcccggttgcaactcgatggcgaattcaatatcccggtctggtggcattcctggcaattcatcaggaaagacatctgcatactcacagaccactgggatgttcttcagaggtaactccgtcatagagaaagcacatgactgagtagaaccttgactaggcagaattaaggtgaagttcccgcagaacggagaattaacttccacggtacggctggctacatcaagcacaacttggtgcaaggtcatccaattagctcctagaaaaatgtccacattttccaaacccaacacaagaagagtggttttgaccatgtggcttcccagttgaacaggcacactttggtttaattgattagttgcaattttacccccaggtgtgactatcataaatgacccttttgagtgagagaatggtagttcacatttagcactgaacttttggctaatgaaactatgagatgcaccagaatcaaatagaattaaagcaggttgattataaactaaaaaggtaccggtcatgataggagctccttcaggtacttcctccagagtagtgaagttgagcttcccttgcctgacttgcaccttctgctttcttcccttgtcttgatttggtgctggcatctgcctctgctggttcctaggacaattattggcatagtggcccacattgccacaagtgaaacacttgttcccattgccctggcggaactgctgctgctgcggaggatgattgttccttggggcgggagctggaaagcggttgggtgccggcttctgctgctgctgctgaggtggcctgatcacccatctgcctgcctgctgctgaaaacccctgctctgattgtgagaagcaatccggaacctctgagcctgagcggatggtgctgccattggtgcctttctcttcttctctgcccggtgagctacaatgcaatcctcttgggagatgaccatgttgaccaactcattgaagctatcagcccggacagtgttgagtcgttcccgcagcttggtattgagacccctgcagaagcgatccctcttcttttcatcagaatcagcatggtatcctgcatactggcataagtcgttgaaggcttgtgcatactgcagtaccgtgcgggttccttgattaagggccagaaattcattcaacttccgatcaagaatgccagctgggatttggtgtcctctgaaggtagtcttgaattcctcccaagatacttcacgatcagcggggagcatagcacaaaagtggtcccaccaagtccgagcagggtcgtgaagctactgtgcggcaaagcgagccttggcctcatcagggcagtctcccgtgaggaggggaaacttggactcaacgacgcgaagccatacgttggcgtccaacggatcctctgccttggtgaacaagggcggctgcgtgctcagaaactcctggtaagttgccattgccggaggtcgctgatgctggcctccaccatgctgctgagggtggggctggcgctgcaagagctgtcgcagaatctcattctgctgggccatcagctcctgcactatgggagctggaggaggtggcgggggaacctgctcgttatgcccgtgacgctgcctagctgccatctgaaaacagagattgtcgccattgttatcccaactcacagtttcgaatgacaagatatcatctcatatggaaggaaaaatgccataatcataatattaggttcgaaatgaatataacatggtgaaaattatcccatagatttcaaaggttcacagggttacatcaatcaggggaaagtacccataagcctagtccaaaatctgatattaactaagctcgcataggtttctatccgcctaaaagtgtcgaagtgactgcttaaccctgagcggtggaagcgacactggatacgggtgaaggaggcatcgcggaggtagtcccattggcaccaggggctggtcctagctcctcaagagcctcttctccctcgcttcctgcttcattggcctccatctccaggtggtgcatgtccaagtggtcatttgcttcttcgagttccctctgcacatcgtgaagctgattctacaagacatcaatagtgttgtctcggatctccacctgctgctccaaggttgtgatgcgctggctcagcctctccacctgcagatccttctctaccaactcggtggatagatcgaccacaaaatcttttcgactgtcgagagtgagcttggcagtttgagcggtgttagcaaggagtgccatagcatcgctctgaagggcctgaaggcggtacaacgcactcatgcactgaacagtgatcctcccaaccaagtcaggatacatcgcccacacatcctttacatggctcacgcggttacaccacatgggatcatccttcttctcagcagggaagagtcccaaggggtgcatcaccatctacaggggatggtagccacagaaagtcatcagagtcttcatggctgctgcttcaacggtgtcgtccgtcctgagtccaattgtctcagaatcaagagaacgccaacccggctgaaggggatgagcctacaaagtcagccagacccgacaacgaggtacccgatgctcctcatacaactgcacagtgtacaaagggggcgtagggtaaccggcagagttaagcacttcccacaagatggaaggaaagctatcgcgagaaaggaagtcggaactgaaacgagtgtctcctccactggcgggggtgggtgaattcatctgcggaagggaatcaaaggtaaagattatggtggaaggaaaaagaaaaagagagcctggatggttctaaagaaagtgggttagctcaaatttttaattcctctttgtgtttataatgcatgcatgctggaagtaacgttacctctccaaaaatagggtgctttttagggcatccttagaaatataagtactggcccacagggcctaattagttagccacctatttctccctctatgcctaaggcctttcgtcataggtctagcggtctagtcctgacgatccgtagcagtttctaggcaagttttagattttgaaaattggtattcatggtttattgtccttctctgtgggggaatttgctccgatatcagctgtggcagaaccacccgaattattccagcttaagtgcctaagtcacgcctcaggggccgcaacacacttaaatcggaataacccgtcagtccttcagatctagtctgatagagccacttaaccaggatcaaattccacagtctcactcgaaggtgagtcacagaagaaatacaataaaacaggaaacctcaaattaagtgctgaattattacatagatcggagtttttgagtagcaaataagagttcacaaaataaagtgcagcggataatcgatgtcgtcggtatcgaggaaatgggcaaggcctagcccactactcctcgtgctcctctcctgccggagcaacatcccactcgaccgtccaacccggtggcagggtggtaggccaagtcacaccatcaaccatttcttggatggtacctgcaaaaattatgccacaagcaaggctgagtatactaatactcagctagacttaatcggtgtgaggagtctactcctctacctctagactatgcagctgtttggctgaggggtttggtttgccaaaagcactagctgtttctaaaatcaatttttagcttttcaattttctatcctcattaacttagctagatttgctccttctaagcatccatggtgacaagcatttagttcaatcaacaaattatctcatgtaacctcatttcacttcttactcgatgcagtacaaggggtcaagcagtctcattagctgcgagaagcagacgattcgaatcgagttttaaccttgcaaggtaaacctaaacaaacggcatgtcagggtactccgaccccacacatgacaaccgtccccatcgattccctgttcgcgtccaggcctcatcgccttggcatacaatgctccactgaccccggctgccgccgtgcagtgaccacacttgtacccaccatagctagcatgggagacccagtctcaggtcgcatgagggataaagtccgcgcccggcttcactcaggtactaggtttaccggttaccatttttcccggcatgtgcttagtacgttcaaaagcttgactcaggtatccacacattaatccttaattcctttttcctgtctcatggacaaggcatcctccctggatccaagtccatagactaacatatatcccgttatcaagatgaatacaatcaattcctgaccttgcacgagtgctagaaaaatcactcgacttctactgagatcctgattagcaagcagctactcgacctagcatactagtattcatctcaaaaaggaatcctaagttcatgcaactagaggtttcaagcaactcctacacttaagtgcacattacaatcctacaagcattaagtgtagtaaagtagcatataataatacggttatgcataaaaccggggcttgccttcaattgctggggctgcggggagatcctcaacagcagcctcggaagcttgatcctggtcctcctcttggacagatccttgctcgaggatgagcacgtactctccgtcggcaagattacaatctaatgaatgcaatgcgtaagatacatgcatgatatgataggtgctttagaaattacaacttttgacggtgtatgatctacttgagttaaacaaggttaactttacttatgtaagacccttgggtggtatacttggtaaattgggtcaaactttatctaagataagtggtaggtttatttttggggttccactgaattctttttaagccttagtgagaattgataagtactcaagttagacttattggggtgaggtttatttcctctttcctttttttattctctttaatgttttggagtgggtttgaactacaagttgcttaaataaaattccaaaaattctgtaaaaattacagtggcttggtactggtgtatatttctctgtctcaaaatttggggatcagaaattgaatagttttctctggacaaaattatcaaattttagggcagaagaggtgctttgaactacaactattatttaacagtgggtaattctctaaaacttattttttctggcttttagatgctataacatgacttgatacaaatttctagccattaataccttttagttattttactatggttttctcaagtttctagccaaataggtgctttctaccaccactatatttgaaaaatatcaaacaacaaagttcttatttttattagttattgttttacgcaagagcaatcattctgaagtttggcatctttttgcttaggggaaggggtggtatgcattatttggattaagtggcctttctcataattcattagcaataggtatgagtttgctcctttttcatgggtttgcatttttctctggtggtttatctcattatggacttagcaaatttttggttgcccattattacatcattaggggttgttcatgatttatttggaaaatgcctattatcattttatatttattttccttacttaaaatgttgggctgaggtgttcattatttttgcagtggggctctggtggttgtaagtccactggatttttattatcaattttgggtatagttttgtaattctaataattgaatttcagttcaaataaggctaaataaaacactttaatttaaaactgatctggactaatggtctctttatttttcctaggttctttgttacttaagtaaactaggaaaaataattctactcactgttcattaatttctaatgcctttctgatttttcctaagttttgggcaaaatagctttaaatgaaaatctacactatattcttcaatactggggttcctactatttttaaacagtgcttaagtgaggtttgaacatctacaaaattttcttaggttcagcacagaagaaaaactaattttccttaattaaacaaggtttggtcagtttctgtttttaattttaaactctaaaatttagaacagaaagcctagggtttatcatttttaaatgatagctcataatatttaggatctagctaaattagtttgacaacttttgattaagaattcatcaagttatggattttctaagttctctggttatttaaaaagattaacagaattgattaaatggaaaactactttgcactggggtccctggcgggtgttttaagttttcttcgcggatcagtccctgggctactattcaaatgagtcactgacgttacagaaacccctcgggttcttctaatcctaacccgaggtccttctcctaacttaaacagtaaccgcagcggaagaaagggcggaggggcttaccggcggcgagattgctccggtgaagtggtcgaggacgtaggggaggttttggggatcacaatggtgtgcgggtcaccgtcggggatggtcggagttggccggtccacgtgcgcaggcggggatgctcgccggtggcgaggagtccggcctgctcacggcgagatagttcaattgaacgggtcagagagcttcacgggattctagagaagatgtgggtgcaaggaattggacgaagactcactggttagctctgtccacgcgctgcggcggaagaccgaagtccggtgaagtcgatctcgggcttccggtgaagtccggcctggtccgagggcttggaaagcttcacgggccactggcggagcttaccgaagcactggctcgacttgggggtggctggagtgggctggccacggtggccgaagctctggcggcaatggcgggcggaaatgagctcgccggagctaaggaggggtggctggctagtgatggtgagcgcggggtgaagtgaggcacgcccggggaggctttataggcgcgggcgagcacggccgagggtggggctctgacaagcgctcaaggcgtgcgcggcgaacgccagtgcgcgctctggcgcctggcacagcgtcgagcacgaggcagcgcagagagaggtcaagttcaagcgcggattgggcccaaacctttgagattatggccatgatcccgttgagagatctcttcctctaaggttcctttgtcgcttgtgtgtggaggctagcaagtttcgctgactggattaagagatagagaggggagaaatcctgtttgtctcactgccacacacagggagaagatctctggtttgacgtgtccgaggcacgcgtcccaatgccatctcctggcacatgacagaggggttagttagggacatttttgttaatggggccattaggattcgagttagggatcaaggtgaacatccttgatctttggctcaaggtctgaatttcagaattctgaaattcagaattcccattaagtccccacatgagaagcttgatttggggttttatttgagttgttttggccaagctttctcaacctttcttgttgcttattaaatatacttcaatgtttataattggctcaagccatgattttaaatttttcatacccttttccttattttcttgaattttgctcttggggctcacttagggttttcattagggttgcaacattattacctttttgaaagacccatttgttttgatcatgatacttttaagtatatgcttggtggattctttgctcttaagttaatttgatgctcatgcttactttggttcacataaaatgatggttcttggtttggcattttaagagaaaccctaggtgacactggggtgtcacatgcgtgatgaccgcaagcccccgagtgtatttcttgcaatagttcctgaccttcggcgatggatatgcatcgttggaggatgcctgaggggctgcggtggtagagctccttcccatcacccagcaagacgaacgacttggcgcgccgcgccagtcgccaagcttcggcgctgtcgaggggtagctcccctcggtgaagatattgtaggtacggggtctgccagtttcgattaggcgtgaccccattccgctcttcctcgacgcgcagtgcctcaccctcgggggccgagggtgcctcgggctgagccgagggcgcctcgggctgagccgagaccttcttgggctcaggcgtgtcgtcagtcttgactgagggttgatgtaggtctcgggagaagacgtccggaggaaccattgtccgccccgaggctatcttagctagctcgtctgcagtctcattgtatcgtcgagcgatgtggttaagctcgagcccgtagaacttgtcctccaggcaccgaacctcatcgcagtaggcttccatcttcgggtcgcggcagtgggagttcttcatgacttggtcgatgacaagctgcgagtcgccacgagcgtcgaggcaccagatccctagcttgatggcgatgcgcaacccattaaccagagccttgtactcggccacattgttggacgccaggaaatggaggcgcagcacgcagcggaggtgcttcccgaggggtgagatgaagagcaggcccgcgcccgctcctgttttcatcaacgacctgtcgaaaaacatggtccagagttccggttggatcggagcttctggaagctaggtatcgacccattcagccacaaagtctgccaggacttgggacttgatggccttccgaggggcgaacgagatcgtctcgcccatgatctccaccacccactttgcaatcctacccgaggcctctcggcactggatgatctcccccaaggggaaggatgacaccacagtcaccggatgagacttgaagtagtgtcgcaactttcgccgtgtcagaattaccgcgtacagtagcttctggatttgcgggtagcggattttggtctcggacagtacttcactgatgaagtagaccagcctctggacgggcaatgcgtgcccctcttctcgtctctcgaccacgatcgcggcgctgaccacctgagtggtagcggcgacgtagatcaagagggcttctccggcagcgggggcaccaagatgggcgcgcttgtaaggagcgcctttaggttcccgagggcttcctcggcctcaggggtccaagtgaagcgctcggtcttccttaagaggcggtacagaggtaggcctctttcgccgaggcgcgagatgaaacggctcagagccgcaagacatcccatgaccctctgtactcctttcaagtccttgatggggcccatgttggtgatggccgcgattttctccgggttggcctcgatgccccgctcggagacgatgaaccccaggagcatgcctcggggtactccgaagacacacttctcggggttgagttttacgcctttcgctttgagacactcgaatgtcgtttcaaggtcggaaaggaggtcggaggctttcctcgtcttgactacgatgtcatcgacgtaagcctcgaccgttcgaccaatgtgctctccgaacacgtggttcatgcacctttggtatgtcgcacccgctttcctcaaaccaaatggcatagtaacatagcagtacatgttaaaaggtgtgatgaaagaagacgcgagctgattggactctttcatcctgatttggtgataccctgagtacgcatcgaggaaagacagggtttcgcatccagcagtggaatccacgatttgatcgatgcgaggcagagggtagggaactttcggacatgctatgtttagaccagtataatctacacacatccgccatttcccgcctttctttctcacaagcacagggttggctagccattcggggtggaatacctctttgatgaaccctgcagccatcagcttgtggatctcctcgcctatggctctgcgcttttcttcgtcgaatcggtgaagaggctgcttcacgggtcgggctccagctcggatatccagcgagtgctcggcgacatccctcggtatgctaggcatgtccgagggactccacgcaaaaacctcggcgtttgcgcggagaaagtcgacgagcactgcttcctatttggggtcgagctcagagccgatccggacttgcttggaggtgtcgttgctggggtcaagagggacggtcttaaccgcctctgctggctcgaagttgccggcgtggtgcttcgcatctggcgcctccttgaaaaggctctccaggtcggcgatgagggcctcgaattcggtgagggcctcggcgtactccacgcactccacgtcgcattcgtacgcgtgtcggtacatggagccgacggtgattgtgacggaacctcccaagtaattaggcccacctacagttgtccttgtctaacagacatcagacaccctgtagatgttcctaagtcacttgacaagctcggtatctttccttaccttaccaggaacgtttcacccgtcttgcagacattacagaacatcggagataaagagatgcggaagcgattacataaattacatttattttaaaagcaagcttaagttattttattacagaccagaaccaaaagcgagtgcagagtagtaatattatacaaaccaagggaggcacaaactcctcccgataagctataagcaaaatatcctatgtggaggaccgagtcctcccgcacttcagtcttgtttttcttctttgggaaccaccttggcacagaagcagcagaaatctgctacttcctcacctaaaaacaacgaagggataaaccctgagtatggaattactcagcaagtcttacccgactaaagaaaagactctcaagggtatgctggttgtatgggagtcaaggtaaggcttttcaataatcaaagactctgttttgcagaaatgcttactaaagtggatccttaaaaatccaattttatttgtcaagttaagtaaaattacctgcactagagttctttctatcctagttcaatcactggtcctgcactagccaatttcttaacaaaagcccatcgtctttagtggaatgctacgtgtagggcagtgaccaagtcttattaaccacgaaggtacggcgatccgaatcgatctccaatcacacgacatatgtagcacttaacccttgcatatgtcaacccgccaccggggttcttaagaccagatcaggttcacgcaaaccgagagcacagatacaccaccgtccagcctcttgccacggagggtacacgctactctcgccaccgctccatgcccatttcgtgttatcttattctggccttagtctgcccgaggcaaggcttacccatgacgaggcatgtaaccagttaaagggtcctcgatcatcaagcctacatcgacaaggtccttaatcgactcagacggagacactacaccgagactctcttctcgtgcaagtcacccgcccggtctcaacttaattatttcaaacccaaagtttggtacctgacagaggtacatcttttccgatgttgaacctatcaaggcctttgatagatccatcatcaagttttattttcgaaaacatcccacccacttttgccacatcatattttgtaaaaacaaaaccttttgttttctaaagcaaggctaagcatcaaaatcttttgtaaaacgggtgatcaaggaaggtaatcaaatcaaggaaggtaatgcaggaatggttttatcaagcaactcctatcacctaatgcaacaatcaagtgagaaagatttttaaaaacatcaaggaaggtggcaaatgcaccggggcttgccttcgtttacaggtgattcgggttcggatccacagatatcgaagtagaaacagttgcctgcttgcgaatccgaaggtggtggtgtcctgtcttcggtgacttctatctcttcttctcgttctaatcataaccatacatatgtataagaatggatgccatgggatgctcatgaagatgcaaagataatataaacttattatctatgtcttgaatacaactttccttcacggaactccgagaacttagggtttccggagtcggtaaaggagttcatagggcaggggggtgttttggggtttggtgatcaaacaaggtccaaatcaattcaacctctacccaaggcttctaaatattgttttaagttcccataaaaagtttgggcatttttggacttaccaattattttctaaaaatccataactaatacttttaaccactttaaataccttaaaatttcttatttccactaaaaatcacaaaactatttttactaaattctagggaaaataacaagcctaggaaaattagtttcataattttatcatttttctactgttttctataattgttttggctctggagataaaagaaaaagacaaattgatgaatagtactgggctgctttcagcccagtagcccagcacagagggagaaagcgcccgcgcgcgcgcccgcgcccgcggtggagactttgcgcaggggtcctcgaggtttttactaatcgcaaacaggttctctcactgtttaacagagtcactgaccgttacaaaaagacccctgcacttctacctattcacggttggaagtccacgacggcgctcgcgcacagccgagctccggcgagcactagcaccggccgattagggcaacggcagggttctccgagcagcggacactaaatcagtactaccccgagcatttcccccaaatcaattgcaaggatggctactaggtttgctctggccgcagtgaccgtggaccttgcgggcagatgaatgtgttcccgtcgattcatggcagtctagttcaattggatggtttggagagcatcaagggcacatgagaatgttagaacaagactgaggatggcagtatcggacctgatttgcgctggccgcggcgagctcgatcatgcggtgttttggaacagggttggggaaaacttggaattggagctcacggttgcaggactgggggtgatactggacgatggggtacgtgatgaggttgcggagctaacggtgggctcaatttcaagactccgggagcggtggctctcaatttgcccacggcgagctggcagccggaggtgaggaagaagcctggcgcgcgtgaatatgtggctaacgccgtggcaagcacaccggcgacaattagatggccgtagcgagtcacggtgtcgcggtggaaagcaaaaccacgcggcgcgatgccgggaagcagcggttctccggcgagctaatccgctccagccgcaaagcggggggaaaagaaatggaaggccgtcggagtggtgtccagctcaccggcagtgaagatttttactgggcgatgcttatctgatggccacggcgcacgaatcacggcgagcggcaatcgacggcgacggccaccggcgatgggcaggaggggtgaatcgtgatcttcatcagtgtagatctactgtaccatggccagtttcagttttttgttacctacctgacagagcaagttcaggtcacattttctctaaattttccttagcaactcatccaaggctctgcagcaaaattttagaccaatgttctagctacaatgttgccataacaactatagccaaattccaattaaatcatgcttgaatttgtgcccaaagttcctgtagtgcactgttagtctgaaaattcagaccttaacagcctggtagccagattttgagcatgattatctctagatttttcacaagaacatgacttgaacccttaaacaaagttgctctcctataattgctttacaaatttggtgtggtgacctagggaaaaaaccctatatttcagaagatacagggctccaaagttgaaccaactaaactgaatttcagacttaggctctatagtgcttaagaggtgatttttgcaaataagcccaaaacttagggtttaacttgcaaattcacatatttgtgaaccaaatgactttatatgtttaaacatagtagtttttacactttagtccaaaggttcatcatttttgcacataagtccctaggatttggttgtagggttttccagggttccaattagggtttttggtaccttaggggtataaatgtgattcaagtttattcttagggtcattttatgacttttcccttaaagcctttaggttttctcaacttgggttgtgtcttaccccctttaatgcctatttagggttaaagcttcctatccatggtcctatttgcaaaacattaaaacaatacaacttgtttgaaatttttgcctagtgaatgcattctaggtgtatcaaacatatgcaatgccaatgcttatgatgccatgctcaagttttagttatggtaacaccaagggtgttacatccttccccccataaaagaatctcgtcccgagattaaaagtcctagggtaagtaatggaaaaggaaacgcggaatacttttatttccttaattctggtacaaggcaggggtgatgtgggggtcacttctctattacacagttatacaggctttacaatttacatgaggctagaaagcctgggaaattcttattcaagaaatcttgagtttcccaagtagcttcatctttagaatgctggttccactgtatcttataaaacttgagagtttttctccgggtaaccctatccttttgatccaagactcgcataggatgtttcgagtatgttaaatctggttccaggacaacatcagtcacttcaatggttcgatcgggaacccgaagacacttcttcaattgtgacacgtggaacacattatgcacagcagacaatgtctcggggagctaaagtcggtatgccacatgtccacattgctcaagcaccaggaatggaccaatgtacctgggtgcaagtttccctttaaccccaaaacgcgatactcctttcattggtgagactttcaggtaaacatagtctccttccaggaaatataagggcattcgccgtgtgtctgcataactcttctgacgagcttgtgccttctttatattataaataattttctgaaccttatcctcggcctctttcaccatatcaggcctaaagaagcacctttcaccaggttcagaccagtttagcggagtacgacatcgacatccatataaagcttcaaagggtgccatcttgatactttcttgatagctattattatatgaaaactccgcaaaaggcaaacattcatcccatttcggtgagaaatccagaacacatgcccgcagcatatcttcaagtatttggttcactctctcagtctgtccactggtttgaggatgataggccgaactgtggagtaacttagtacccagggatttatgaagttcttcccagaatttggatgcaaattgtggtccacgatccgacactatagtctttggaacaccatgcaaactgagaatacgggcgatgtacaactccgcataggtaatgacgggatattttactttgacagggatgaagtgggcgatcttggtaagtcgatcaatgataacccaaatagagtcatatccttttgcggtcctgggcaatcccacaataaagtccatactgatgtcttcccatttccatgttggtattggtaacgactgtaatggaccagcagttttcatgtgtatggccttgacacgtctgcaagtgtcacacttagccacatagcgtgcaatttcgattttcatctttgtccaccaataatgttgctttaagtcttggtacatcttagtgcttccgggatgaatagaataacgactaagatgtgcttcatcaagaatttgctggcgaagttcttcgttctttggcactactatgcggtttttaaaccatatcacaccttgatcgtcttccttgaaacatttggctaccccagcccttatcttctctcgtatgtgcttcatacccagattatctttttgagcatcaattattctttgcaaaatgattgactcaagctttaactgatttagagtcccttgttggattatccccaggtttagcttttccatttcttgacacaaagtgttctcggaggtcttcgccataacacagtggcaggaagtcttacgactcagtgcatctgccaccacattggctttgcctgggtgataatggatctccagttcatagtctttaataagctcaagccatcgtctttgcctcatatttaattctgactgggtgaagatgtacttcaaacttttatgatctgtatatatgtgacagatatttcccagcagatagtgacgccaaatcttcagggcatgaaccacagcagctagctccagatcatgagttgggtaatgctcctcatgtcggcgcaactgccttgaagcatacacaattactcggccctcttgcatcaatacacagccgagcccactgccagatgcatcacaatatacatcaaaaggcttagtgatgtccggttgagccaataccggagcagtggttaataatgtcttcagttgctcaaaggcttcattacacttagaagaccaattgaacttaatgtcattcttcaataaacttgtgattggcttcacaagcttagaaaaatctggtatgaatctgcgataatacccagctagtccaagaaaactccggacttggtgaacagtggttgggggtttccactccagaatatctttgaccttgctaggatctaccacaattcctttagccgataacacgtgccccaaaaattgaatttcttccagccagaacgcgcacttgctgaacttggcatacaactgatgttccctcaggcgcgtcaatacaatccgtagatgctgagcatggtcctcttcattcttagaatatatcaagatatcgtcgatgaagactaccacgaacttgtccaactcgggcatgaacaccgagttcatcaaataggtgaagtgggcaggagcatttgtgagcccgaaagacattaccaggtattcaaacaatccgtaccacgtagtaaacgcggtcttcggtatatcctcgggccgaatacgtatttggtgatagcccgacctgagatcaattttggaaaataccctcgccccagtcagttgatcaaataagatgtcgatccttggaatagggtacttattcttgatggtgacctcattcaggggtcgataatccacgcacattcgcaaggtttgatccttcttcttaacaaaaatagcggggcaaccccatggggacgagcttggccggatgaatcccttatttagtagatcttgtaattgaatcttcaattccgccaactcattagggggcatacggtacgatcttcgggagatgggagccgtaccgggctttagctcaattacgaattctacatctcttttagggggcagtccaggcaaatcttccggaaatacatctggaaactcacatactaccggaatgttcttgatctccggtacgatggcttcatatactctactagaagctttggctggattggttacggggagagacaaaagaatctcttcttgattgtagctcaacctgacggttctgagttcagtgttgagaattgccttgtgttgggttaaccaattcatacccaaaattacatctatatcctggcctttcagaacaatcatgttagcaggaaagttccgtccggccattgttactggcactccataggccacttctctagtaaaaatgtgtcccccaggtgaatgaattttaaatccctcctttgattcatggtatgcaatgtgatgttgctccacaaatttcttgctaatgaatgtatgtgaagcaccagaatcaaaaagaataattgcagggtgactggccacgggaaacgtacccatcatcaccggctctccttccggtgtagtggccacttgggtgtaatatacacgccccgtcttctttgtatttttccccacaacatttcctttgggctgagctgatctcccagatccttgcggagcatttgattgattttgcttaggatatgggcagtctttgatgaaatgtcccgacttgccgcaattaaaacacccagttgaagaactaggcaaggcagggaatcgagtgcctggggcacccggctgatttggggtagtgggggtattgttggggcgaataatgattggttgtttgaaggggaatgagggtggacgagaaaaagtgcgattttggcttgaaggccggatcacaaaccgttgcttcttcgcctggccctgattaggcctctcaccaccgaatcccttattcttcccagaacttgcgtattttgcttcaacagataaggctgtgctgacagcctttccatatgtgagatctatgcatgtggccatcttcctttgtagccgatcatttaaaccccgcataaaacagttcttcttctttaaatcagtattcacctggtcgatggcatactgtgacaggtgattaaacttgttgagatactgattgacggtatctcccccttgttgtaacttcataaattcctcttgtttcatatgcagcactccttcgggtatgtagtgctcacggaaggctgctttaaactcatcccaggtgacttgatggttgacaggttgaatagccacaaaatttccccaccaggtactagcaggaccacgtagttgttgtgctgcaaataacggcttctgcgtctctgagcagcggagaagaccaaacttttgttcaataacccgtgtccactcatcagcttctagtggatcttcagctttgacgaataggggtggacgggtttccgagaaatccagataggtaggttcacgagggccttgctgaaaaccccttcctgcctgctgttggaattgctgctgacccgtcatttccctaaggaagcgggtattgtctgcggtggcattcaccaaggtggcaatcgcctcggctaacgtgggaggaaccggaggtgggtttggggtaacatcccttcccccagaagttccggctgcgtcctgtcctcgagtcctggtcggcatctgtggcaaagaacatttgaagtaaacataatatgccagagaaaccttccattttacattactataaaaagtaatgatacagactcgatattacataacaggatacattacccattatacaaaagttcaacctattatacaacagtacaccctacaatacactactctacttttattacaccattagtcctgctttccgttactcttggcggcctcatcgtcaggtgtgggagtccagacatcaaccaacctcaaggaaggagggggctcaaaaaggtctaactccccacccagcgcgcgtcccgcaacgtgagatggtccggcttccgcctcagcagggtgtgcaggcacactagggtgtaattgtgagtatagtatatggacttcctcatgcaacgtattgcagtaaacctgcaggttatcgacagttgagctaagttctttaattcgggcctgagccctcgcttccttagcacatgctagcaaacgagactgtacggcccagtcaagtgctaagtttcgatcagcaagctgatcctgcaggtgacggatgtcccttcttagttcattgattctatctccgtcaacgacccaagcatcggtcctgtgttgcagcgctgcttgaagtcgactcactcgggcttcaagatctccgatggggtcattacttccactgctgctgctttcatgtcggggagccagttgatgccgaggcacaccaatcggtctcgttgacttgcgtgccgttagccttgtgcgtggcggcatctttctaagggggaaaatgttattagtattattcttagcatgatgcatgtgtaagtacaaaatcaaccttagtcgattcaaccttctatacatcgcactctttctatctggtctttaagatagactcttcagaatacttaagtaagaagagaaaagagtttttaggtaagacttttgaaaatccttttgaagatgcctcataatatctgcaaagaagggctacgctccgataccagctgtgacggaacctcccaagtaattaggcccacctacagggtgtctgatgtctgttagacaaggacaactgtaggtgggcctaattacttgggaggttccgtcacagtgatgaccccgttggggcccggcatcttgagcttgaggtaggtgtagttggggacgaccatgaacttggagtagcatggtctccccagcactgcatggtaggttcctcggaacccgaccacctcgaatgtgagggtttcctttcggaagttggagggagtcccgaagcagacgggcagatcgagttgcccaaggggttggacgcgtttcccggggatgatcccgtgaaagggtgtcgcgctggcccggatcgaggacagatcgatctgcaggagcccgagggtctcggtgtagatgatgttgaggctgctgcctccgtccatgaggaccttggtaagcctgacgttgccgatgacggggtcgacaacgagcgggtacttccccgggctcggcacgcggtcggggtggtcgccctggtcgaaggtgatgggcttgtcggaccagtctaggtagactggcgtcgccaccttcaccgagcagacctcccggcgcttttgcttgcggtgccgagccgaggcgttcgccacttgcccaccgtagatcatgaagcagtcgtggacctcggggaactgctctgccttgtggccctccttgtcgttatcgtgggctctgccaccttccgccggtggcccggccttgtggaagtagcgccgaagcatgacgcactcctcaagggtgtgcttgacgggaccctgatgataggggcacgatttcttgagcatcttgtcgaacaggttggcgcctccaggaggcttccgagggttcctatgctcggcggcggcgacaaggtccacgtcggcggcgtcgcgttttgcttgcgacttcttcttgcccttcttcttggtgctgcgctgagcggacgcctcggggacgtcttccggctggtgcccctgaggctgcttgtccttccggaagatggcctcgactgcctcatgaacagaggcgaacttggtggcgatgtccatcagctcgctcgccctggtgggggtcttgcgacccagcttgctcaccaggtcgtggcaagtggtgccggcgaggaacgcgtcgatgacatctgagtcggtgatgttgggcagctcggtgcgctgtttcgaaaatcaccggatgtagccccggagggattctcccggctgctggcggcagcttcgaagatcccaggagttcctagggcacacatatgtgccctggaagttgctggcgaaagctttgaccaggtcgtcccagttggagatctgcacaggaggcagatgctccagccaggctcgggcggcgtcggagaggaacagggggaggttgcggatgatgaggttgtcatcgtccatccacccagctggcaggccagccggtagtccgcgagccatagttccggtcttgtctccctcgagtacttggtgatggtagtcggggttcggaaccgggtcaggaacggcgcccgtcgtatggcccgactgaaagcttgcggaccggttggttcaggcgaggggctctgatcctccccgctgtcgtagcgtcccccacgcctggggtggtagcctcggcgcaccttctcgtcgaggtgggctcgacgatcgcggcggtggtgctcgttgccgaggcgacccggggccacaggcgctgtgtcccgcgtgcgcccggtgtggaccgaggcttcccgcatgaatcgggaagtcgcggcgcgatgctccggggggtacccttgcctttgggaggcagagctttcggcccgtcggaccgcggcatcttccaggagattcttgagctctccctggataagccacccctcggtggtggatggttccagcatcgctcggagtagtattgctgctgcagccaggttctgaccgaccccactaaaagtcgcgggcagccttgccctggcatcatcggcgatgcggtgcctgacgtcctgggccagatgacgcgcttctctggctggtgctcggcctgcccctcctgcacgatagtctgtcggagctgcacaagttgtcctgcttcctcgtcgagcctggcctacatctcacggatttgctcgagctgtgcgtcctgaccccccgcagggactgggaccacagctagctcccgaaggatgtcaacgcgaggcgcaggcctagggggatcaccgtcctccggcataccaagatggttgccttcgtcgagaccccctagatcgacgtggaagcattcgcgacttgggccacagtcctcgtcgccgagactgtggctactatcggagcaatcggataggaagtagtcacatgcggtcatgaagtcccgcatggcacaggggttatcgagcccggagaaatcccaaacagattcgagctcgtcatcttcctcagaacccgagggcccgtaggtcgagacggccgccagtctatcccagggtgaccgcatatggtaccccggaaggtttggacatgcctttatgaaagtgtccaccaaagcaggcttgcttggtgggttgcagctgaatctaaaaggcataggatgggaaacggacggtacctcttgattgacgggtggtgacgaagtcgcgtcagggacggactgcaccgttgtctcaggtacgaggctaacgcccagcaagtccttcgcgagcgtgctggcatcgtctgtctgcttgggattggcatgttgcggggaaacgactctcgtcttcgtctcagacgcgaggtcaacgcccaatgtgtcccaggctggggcgcccgcgccgtcgactcgctcgacagccgacgaggtgccgcctcctgcttggccatgcctgccctgcctcctcctccatcggcagggaaggtgacgggacagacccggatgttgctcttccgccacatggggaagacgtcgtcgactctggcgccggtgggtgggctgacggccgccattgttgttgtcgcgcggcggaggaaggagtatcatgtcgtagctgccgtcgggggacatgaactcaaggctcccgaaacggagcaccgtcccgggttggagaggttgctggagactacccatctggagcttgacgggaagctgttcgtcaacacgcagcaggcccctacctggcgcgccaaatgtcggcgtttcgaccccgggggggtccctggaccgacgagtaaattgtcgctgcgtgtcccagcccagatgggtcggcacgagacggaacacaaggggggaaaacagtaaggggaaatcgcggccttcgtgttgtcctgtgcccagggcggatgcgcttgcagtagggggttacaagcgttcgcgagggagagtgagagagagggcgcgagcctcgtgcgtcggcccgttctcccgcgcggccacctcctcgtacgagagccctggaccttccttttatagatgtaaggagagggcccaggtgtacaatggggggtgtagcaatgtgctaacgtgtctagcaaaggggagccagggccctatgtacatgtcgtcgtggctgtcggagaggtgttgctgccttgttcatgtgatgttgtggccgtcggaggagcgcttgagccccgtggaagtacagctgtcggggctgtcggatccttgctgacgtctccttgcttccgtaaggggctgagagccgccgtcgtcatggagcacgcggggtgccatcattacttgtttaccggggcgaaccagatgggacgccggtcttgttccccgtagcctgagctagctaggagtagggtaatgatggcccccctgcgacgtggtcggtccgagctcgaggtcgggcgaggtggaggctcctccgaggtcgaggctgagttcgggcccgggggtcgggcgaggcggagaccgtcatccgaggtcgaggttgagtccgatcccaggggtcgggcgaggcggagaccgccttctggagtcgaggctgagtccgagctcaggggtcgggcgaggcggagaccgccttccggagtcgaggctgagtccgagctcaggggtcgggcgaggtggagaccgcgtcttccaaggtcgaggctgagtccgagccctggggtcgggcgaggcggagtccgtcttccgaggtcgaggttgagtccgagccctggggtcgggcgaggcggagtccatcttccgaggtcgaggttgagtctgagccctggggtcagtcgaggcgaagcttcctatggcgcctgaggctggacttagctgctgtcggcctcactctggcgagtggcacagcagtcggagcagcgcaggcggtgctgttttcctgtcaggtcagccagtggaggggcgaagtgactgcggtcacttcggccttgtcgactgaggagcgtgcgtcaggataaggtgtcaggcgatcctcgcattgaatgctcctgcgatacggtcggttggcgtagcaatccagccaaggttgcttctccgcgaagcctgcccgagctgggcctcgggcgagtcgaaggtgcgtccgttgcttgaggagaccctcgggcgaggcgtgaatctgccttggtctactgttccttcccgaggctgggctcgagcgaggcgagatcgtgtcccttgagtggacggagccttgaccggaatcgcgcccatcaggcctttgcagctttgtgctgatggggtttaccagctgagattaggagtcttgggggtacccctatttatggtccccgacagggggtgtgccgaattgaggctccaccttcgtgtgggtagcgacccgcttcttccctcactgtccgggggagatggcttctcggcctagtggctctggcaccgcctccggcgctgcatcctgccactgaggcggagcgtggctgcccgtccaccgcatgggcgatggtggcgctgtgcgcgggtcggccacatccatggcttctcccgcgcctccggctgcactgggaggctgtacaagacatcatacgccgtgggggcagcgacggcgttcttgacgatcttgccttcactcccgcagcgaggacgggagcgaagacctcttcgtgcgcactggtacagccactgcctaccggtgcagaggtgatcaccgccccagcggggctgatgtggtagcttctgctgatgaggctacccacagcagaggtggttgcctccgctggcgagaccgtcagtgccacctgctgccggtccttcggctctttggctttaatggcctcgctgttacccccataggaggacgggggcgaggtcctattcgcagcagcgcttgccctgaggcgatcactgctgctgtctagccgatcgaggtggaggtcgttgtcgctgctggtgcagaggtggtcgacgtcgttggtggggctgtccggagccagcttctagcgcggctcttgctggtgtggaggtagttcattcctgtagaaatggagctgggtcccgcttgtaagggaatgtaataacctctgcttgagagcaaaatgtaataacatatctacgcaggattttatcctgggaaaccaagttgtgcgtccaaaccccctagatggtggcttcaagtactaagacacctgccgcagggcggtggagtatgcaggctcacggtacgggactagactgagcggctacatggtttccggaccccccccaggagacaagtgcccgttcctcagagccggacctccaggttgttggacccacaggactttagtttcaaataataggacgcccgccacgcagtggtggagtgtgcaggattttgggtacggaaccaggctaaccggccacacaggctccggaccatcctatggaacgggcatccgttctttagaaccggcccctaggccttcccctgtttttgtaaagaaataaatattgtcttctaagcggcatttaacttatctgtgcaacacctgttcctgttgtgtgcgatgttgttgactcctccttagtacctggccccccgcctgggatgcaggcttgatgtgttgaggttggatgccagcgttcctgaaaaggtcgtcaacaatcctcgggaggcagactcgctgggatctggatctgtacacaacttttagctaggaagcattagtagtacacctcatagggttctccgtctgacattagtcgctctttaatacatgctcgggacctgcaggttttagtccgggtggccaagttgcgtgttcggacccccttgggtcgcggttccagatactaggacacttgtcgcagggcggtggagcgtgcaggcccacggtacaggaccaagcagagcgactgcacgggctccggacctccccaggagactagtgtccattctctagctctggtcctgaggtggtcggacccgcaggacttataactctagatactaagtccctttcatggggtggcggagcatgcaggcccacggtataggacctggctgagcggctacacgggctccggaccaccctatggaacagggtcccgttctctagagccagcccccaggctgtcggacctccctactttcatatcaggggccctaaactgcaagcctggctgttaaattcggatgtcgtcatgtcagacagatggaaaccgtaagggtgggttagctaaaaagtatttatctgaaaaactgtgaggtaggaccatggagcagcaagatagaactgtcacaagagcgcagctgaggggggtagtttctctttataacttgtcatgcatgtgtgcagaccaatagtccgggttcatgggggcagaccccaccggattgtcgtacacgtatgcgttatctagtcacaagaaagggaaacagactcgaccccttagtcttgctctatggatagaacatacagagatacttgacatcggggtaaggtgctcctccagtcatatctagatggttccccttgggtcggagcactcctgttaccttgaagggtccttcccagctgggggagagttgcggagcccctcttggtatggtatctgccgtggggctaagccccgacccagggttcccatctgtatttgacttgggagcccctgtctcttgctgtgatcactcctacatatacctgtctgcagctcggacccgtgggggtccggaagggcctccggaggaaaggcatgcttcagctccatagaccggggaacacggggtccttctggggttcgtctagttgtcttcaccggagtaggagcctctggtgaagatatctttcaggtccccctcgggcgactggtacccgaggtcccactcagccgcggctacctcgccgtcatcttccttctctttaccgggccgacggtgaggcggggagccgtctttggaagacttcttgcgccgcttgctgacgcgttttgcgaggtcaataatctcgcgacactccgctgcactgtggcgaccatacgggtgcacagggcacggaccgctgccactcttctgcggtcgtgggcgcttgttgcggtcgccctggcctctggtcactgctgtggccaccagagcagtggaccgtggcctctggtagtcacggtccttcttctttttcttctttccgtcccggaggacggcccctgagccacccgactgggcagccccagtttgcggggccgagtgtcatgcacggccctcggcggccctggcgcatttgtcggccagggcgaagagcgtagggacagtttccacgtcatgtgtggccaacttctccaacattttctcatcacgtactccctgtcggaaagccgtggtgatagaagcatcagaaatacgaggtatcgtacctcgtaccttggtgaagcgggagatgaacttccggagggtttccccgggctcctgcctcaccgcatggaggtgggcttccacaccgtgctgttggaaagcacttgcaaagttcgctatgaaccgcacacagagttcttccctggaatagactgatcccggggtgaggttcatgagccaggtccgggcaggtccagacaaggccacatgaaagtatgttgccatcacagtggtgtttccacctgctgctgtgatggcggtaacgtacacctgcaggaactccgacgggtttgatgtcccgtcgtatttttccggcaggtgtggccggaacttgggtggccaggatgccgcgtggagatgatccgccagagcggcgcagcctacttcggccaaggggacacacgtctgggaccgggtgcccattggtgtctgcggtgcaaccgcagcgaagtcttgatagaggtcgcgcccattgatgttttggcggcgctcgcgcgccctttccaaagatacccgagcatcttctcccgcacgcctgcggttgagttctgcccagagatcattggtctacgtgcccctcactgagggcgagcgcaccgatgctgatgcctcgtgttggcgctgtgatgaccgtgccttcgaccgggtcgaggtagaatgcgtcatactgagcagccgatcgacgtcgtcctgccactgcttcatggctcctggtgatgccgtggagcttggagggtgtcgcaataactccctggctactgacaacgcccccggagacgcccttgatggagtccgggatgtttgcactaccgtgtgctgccgtgcggtgtgcacagcaggagtgactggtgtcgggcaactgggaggctgcggtgtggaggaagtagcttctccctccaccgcaaggtctaccgaagtctcggcgcggtgctctactatctgcaccatcatgtttgggcaagaaatcaagcgaaaacccaatgcctagtgcccctacctggcgcgccaaatgtcggagagtagatctccggccgggtggcggagtgcacccgccctaagtcctgagatgagcaggggcttaggcatttcgcttgatttatggagagaaggggcagtacacaagaacacacgaggatttagagtggttcgggccgccggagcgtaataccctactccactatgagatgtattgcttgagggcttgtatgagctagcgagtctgagattgtgtgtgtgtaacgtcgcatgcctccccttttatagctgaagggggcatgcacaaagggactgggcccagggacataaagaatatagcgcttggatcctctgatatctgttatcgagacaatcttctctgcccgagatctgcgtatccccggcgtaccaaggaggcttcttgcggaagagaagatgagtatagcacgccgctcagcacaggcatactattcaccagcagacctagcaggcgtgctgtctgctggatgaccttaatgccgcctgccagcggatgggacgggttgcattaaatgttgagggggcacgtcgcctgttagtgcagtggcaggcggcgcgtcttttcctcaataaatgcagggggcgcacgacttctcgtcaggtttggcccgatagcttatgtcatgggccacaagcagcgggtcttcgcctgtgcgggaagtgaagagcaaggcctgcacacgtgtcagcaccggacccccgcataccccaaggtccttctcgttccggaaccctgccgggtttcggccctacccgggggctccggacctgtatgtatataggggcccggtgaccctctatgggggtccggccttactgaggcatggtgcctttccttgccacgtggcgccctttggcctgcccatccggtggagtcaggcgtggtcctccgcgcgactaggagacgtcgcatgggtgcgatgcctttatgctgtaggagattgtacccctgatttagggtaccgacaacatagataatgagtgacaagtttagaaaaaaagtattgcaggtttatttcatgtaaaaggatgatatattggttaaaagttggaagagtcctttattgaaatcatggtttagtggtttgtgaagaatgatttattgaactttagataatgcaagaactaatttagtgacagtcactaatatagtagatgatcttaaggtgcatggtgatgtgtctttagttgttgatggtttgttttatcatattagatgtgtatgccatattttgaatttggtcgctaaagttggtttggttgttatttctagatctattgacaagattaaagtagtagtactgcttgtgaaaagctctcccttgtaatggaggagctcatgaagcatgctaccaaatgtgggttggatacatcaaagagcatttaacttgatgtttcaactcggtgaaactcaacctacttgatgctaagggatgcattatattataagcaagttttattaggcttaagacttctaatcgtcataagtacatgcacatctctcattctaaaattgaatgtaatatagttgttattatttttaagtccttaatttttttatgatttgattgaactactatctagtactttatatccaactgcaaattttatagaggtttatgtgacaggagatattgaataaatggtgtgttcttgatgatgtaataattatggaaatggccaagtcttgcaattctatgagtgaaaatgagaaattttgtagttgttctaatgcaaatcttgcagtgacattctttcttgaacctatgtacaagaagaagctaatagaatattatatgaagaagtcatatggtttcccatgaagagggactaggggcaacaaaaaatgtacaacattcccaagtccccggtgaaccaagctcgcaactacaggggcataagatggacggaccatgatttcgcacgactaatgctaaggtgatttatcatttttgatgctaaccttgtctccctagttcgcgagaaccccaggtacacaaagatgagtcccgaggaggtgatgggtaagttcattagccatcaaatgatggttaagaacgcaaagtacatcgatgacgtcgccaacgggagcctcctcgcaattgaacagtaagtcatcgccttcaaggcgacaaacaacaaagtggcgctcccaagcaaagtggcgcaagttgaggcggctggcctcgacgacaatgagatggtgcttgtaatcaagcgcttcaagaacgcacttaaggggtgcaaggacttctccaacagtggcaaataaagagggaaacatgcctgcttcaagtgcggtaagaatggtcattttattgctaaatgccctaatgatgagaatgaccatgataaggacaagaacattaagggaaagaaagtagagaagaagaggttctataagaagaagggtgaggcgcacatcggcaaggaatgagactcggattgctcttcatccaacttcgacgacgagggactcgccgcctccaccttcgacaagtcttctctcttccccaacgaacatcacatgtgcttaatggccaagaagtagaaggtattttcgagggagacacctaaatatacttcttctagtgatgccaaattgagtgatgatgatattgattataatgacttgtttaggggattagatagataaaaaattgctaaaatcaatgaattacttgatgctttgaatgaaaaggatagattgacagaaaagcaagaggatttactttttgaggagcatgataagtttgttgatgtagaaaaatcccttgctttagaaataaagaagaataaattattatatgtcgacttgtctatctgtcattcatttgtttctagtcttaagattgtcaatgatgatttgaatgataggctagaaaaattgaatggatgccatgttgctagttcatcccttgagaatgttgttatttgcaatagatgcaaggatacaaatgttgaatcatgtgttgcaaatattgctatgattgctgacttgaatgttagatttgaaaattaaatgttcaagttaaaaatgctaaggatgaatgtgataaaaccaaattttctaggggcatacacaagtggtacgcatccctccattaaggatggtcttggctagtaaaagggaaccaaagataaaaagagccatgagacccccaagttaatcaaggaaaaggggaaagcgcatgtggctagtatttctcattcttctcatcttagcaagaaccatgcttatatttatgctaatgttaagaatgttaggaatgaaacttgtgttgatcgtgtttatcatgtgcgtcatgatgttgtttactcttcacatgccatgattgcttgttctagttcatcctttgctcatggtaggagtaggcgcaatgtttctcatgatagatccactcatgtgcctaaggctaggaatgcatcatatggtccttctatttcttatcgtatgtttgatgcttcctatgtgctttattgtaaatctggaaaagtagttgctactaatgtgggacctaaacgcaagaatgataagacttgtgtttgggtaccaaaagtttatgtgactaacctgacaggacccaactctatttgggtacctaaacccctagactaaatttattttgcaggtttatgcatttggaggctcaagtcgggttattgatagcggatccacaaaccacatgatgggggagaagcggatgttttttcctacgtcaagaacaaagattcccaagacaaaatcatattcggatatgggaatcaaggcaaggtaaaggggttgggtaagattgcaattactatcgaacattctatttgaaatgtcttcctggtatattatttagactataacctactatttgtcagtcaactttgctctattggatataatttcttatttcctaatgttgacatgacaatctttaaaagaagtgatggttctattgcatttaaatgtgtacttaatggaaagctttatctactatattttttaaacgatatcgctaaacttgatgcatgtttacttgcaatgaccaacatgggttgcttatggcattgtcacctagtatatgttgggatgaagaaccttcacaagcttcttaagggtgagcatgttttgggactaacgaatgtctgttttgcaaaagacagaccttgtgcagcttgccaagcatgcaagtaggttggaggaggacatcattctaagaacgtcatgactacatcaagaatgttggagcttcatcacatggatctctttagcctgttgtttatcttagcatcaggggaagtaagtatggtcttgttatagttgataattattctcgcttcacttgggtattcttgttgcaggataaaagtgaaacctaagggaatctcaagcgattcttaaggcaagcttaaaatgagttcgacttgatgctcaagaagataaggagcgacaatggcacaaagttcatgaaccttcaagttgaagggtactgaaagtcgcctagagggggggtgaatagggcgaatctgaaatttataaacttaagcacaactacaagccgggttagcattagaaatataaatgagttcgagagagagggcaaaaaaacaaatcgcaagcaaataaatagtgagacacaaggatttgttttaccgaggttcggttcttgcaaacctactccccgttgaggtggtcacaaagaccgggtctctttcaaccctttccctctctcaaacggtcacttagaccgagtgagcttctcttatcaatcaaacgggacacaaagtccccgcaaggaccaccacacaattggtgtctcttgcctcggttacaattgagttgatcacaagaaagaatgagaaaaagaagtaatccaagcgcaagagctcaaatgaacacaagtcactctctcactagtcactatttgatttggaatgaactaaggacttgggagagaatttgatctctttggtgtgtcttgtattgaatgctatagctcttgtaaggtgtaggaagttggaaaacttggatgcaatgaatggtggggtggttggggtatttatagccccaaccaccaaaagtggtcgttgggaggctgtctgtcacatggcgcaccggacagtccggtgcgcctgccacatcacctggccgttggattctgaccgttggagcttctgtcttctggggcaccggacagttcggtggtgcaccggacaggcactgtttagtgtccggtgcgccacccatctctgccctgactctggcgcgcactgtagcgcatttaatgccttcctcacacgaccgttggcgtgaagtagctgttgctccgctggcacaccggacagtccggtgcttcaccggatagtccgatgaattatagcggagcggcctccagaattcccgaaggtgagcagttcggagttggagtccctggtgcaccggacactgtccggtgcgccagaccagggcacacatcggctgactttagctctctatatttgaatcctctctcggtcttttattggtttgttgtgaacctttggcacctgtagaactcataatctagagcaaactagtcagtccaattatttgtgttgggcaattcaaccaccaaaatcaatttaggaaaaggtgtaagcctaattccctttcaatctccccctttttggtgattgatgccaacacaaaccatagcaaatatagaagtgcataattgaactagtttgcataatgtaagtgcaaaggttactaagaattgaaccaataaattctcataagatatgcatggattgtttctttatttttaacattttggactacgcttgcaccacagttttgtttttgcaaattcttttgtaaattcttttcaaagtccttttgcaaatagtcaaaggtaaatgaataatattttgagaagcattttcaagatttgaaattttctccccctgtttcaaatgcttctcctttgactaaacaaaactctccctcaataaaatcctcctcttagtgttcaagagggttttagatattagttttgaaagggttgtaccaatttgaaattctatcaacaataagataccaaattaaaaaatcatcaattgaaaaatcttttcttaactcgaatttttgaaaatttgtggtggtgcggtccttttgctttgggctaatactttctccccctttggcatgaatcaccaaaaacggatacttaagtgaaatataagcccttataactactttctccccctttggcgaacaaaatatgagtgaagattataccaaagttggagagtggctcggagcgacggcgaaggatgagtaatttgatggagtggagtggaagcctttgtcttcgctgaatactccaatttcctttaaatctatgacttggtttgaaatacacttgaaaacacattagtcatagctagatcaaaggtatattaatgagctatgtatgcaagacatcaaaagaaattccgagaatcaagaatatttagctcatgcctaagtttgttaaatgtttgttcatctagtggcttggtaaagatatcggctaattgttctttggtgttaatatatgcaatctcgatatcccccttttgttagtgatcccttagaaaatgatactgaatggctatgtgcttagtgcggctatgctcaacgggattatccgccatgcggattgcactctcattatcacatagaagaggaactttggttaatttgtaaccatagtccctaagggtttgcctcatccaaagtagttgcgcgcaacaatggcctgcggcaatgtactcggcttcggcggtagaaagagctacggaattttgcttctttgaagcccaagacaccaaggatcttcccaagaactgccaagtccccgatgtgctctttctattaattttacaccccgcccaatcggcatccgaataaccaattaaatcaaatgtggatccccgagggtaccaaagcccaaacctaggagtataaactaaatatctcaagatttgttttacgaccctaaggtgagcttccttaggatcggcttggaatcttgcacacatgcatacggaaagcataatatccggtcgtgaagcacataaatagagtaaagaacctatcatcgaccggtataccttttgatctacggatttacctcccgtgtcgaggtcgagatgcccattggttcccatgggtgtcttgatgggtttggcatccttcatcccaaacttgtttagaatgtcttgagtgtacttcgtttgactaatgaaggtgccctcttggagttgcttcacttgaaatcccaagaagtacttcaactcccccatcatagacatctcgaatttctgtgtcatgatcctactaaattcctcacatgtagattcgttagtagacccaaataataaatttggcatacaaacaaatcatttgccattgttttagtaaataaagtaggataggcctttccgactttgaagccattagtgataaggaaatctcttaggtattcataccatgctcttggggcttgcttgagcccataaagcgccttagagagtttaaatacatagttagggtactcactatcttcaaagccgggaggttgctcaacatagacctcttccttgattggtccattgaggaaggaacttttcacgtccatttggtaaagcttaaagctatggtaagtagcataggcaagtaaaatgcgaattgactcaagcctagctacgggtgcataggtttcaccgaaatccaaaccttcgacttgtgaatatcccttggccacaagtcgggctttgttccttgtcaccacaccatgctcatcttgcttgttgcggaaaacccacttggttcctacaacattttggttaggacgtggaactaaatgccataccttattcctagtgaagttgttgagctcctcttgcatcgccaccacccaatccgaatcttgaagtgcttcctctatcctgtgtggctcaatagaggaagcaaaagagtaatgttcacaaaaatgagcaacacgagatcgagtagttacccccttttgaatatcaccgaggatggtgttcacggggtgatctcgttggattgcttggtggaatcttgggtgtggcggccttggaacttgttcatcttcctcatcttgatcatgggtatctcccccttgatcattgctctcctcttgaggcagctcattatcttgatcttctccttcatcatcttgagcctcatcctcatcttgagttggtggagatgcttgcatggaggaagatggttgatcttgtgcatttggaggctctttggattccttaggacacacatccccaatggacatgttccttagtgcgacgcacggagcctcttcattatctagctcatcaagatcaacttgctctacatgagagtcgttagtctcatcaaacacaatgtcacaagaaacttcaactagtccagaggactttttaaagactctatatgcccttgtgtttgaatcatatcctagtaaaaagccttctacagccttaggagcaaatttggattttctacctcttttaacaagaataaagcatttgctaccaaagactctaaaatatgaaacattaggctttttaccggttaggagttcatatgatgtcttcttgaggattcggtgtagatacaaccggttgatggcgtagcaggcggtgttgaccgcctcgggccaaaaccgatccaaagtcttctactcatcaagcatggtccttgccatgtccaatagagttctattcttcctctccactacaccattttgttgtggagtgtagggagaagagaactcatgcttgatgccctccacctcaagaaagccttcgatttgtgagttcttgaacttcgtcctgttgtcgcttcttatcttcttgattctcaagccaaactcattttgagcccgtctcaagaatccctttaaggtttcttgggtatgagattttacctgcaaaaagaacacccaagtgaagcgagaataatcatccacaataactaaacagtacttactcccgccgatgcttatgtaagctatcgggccgaatagatccatgtgtaggagctcgagtggcctgttagtcgtcataatgtttttgtgcggatgatgaacaccaacttgcttccctgcctgacatgcgctacaaatcctgtctttctcaaaatgaacatttgttagtcccaaaatgtgttctccctttagaagcttgtgaagattcttcattccaacatgtgctagtcggcgatgccagagccagcccatgttagtcttagcaattaagcaagtgtcaagttcagctctatcaaaatctactaagtatagctgaccctctaacactcccttaaatgctactgaattatcacttcttctaaagacagtaacacatatatccgtaaaaagacagttgtaactcattttacataattgcgaaactgaaagcaagttataatctaaagaatctataagaaaaacattggaaatagtatggtcaggtgatatagcaattttacccaatccttcgaccaaaccttgattcccatccccgaatgtgatcgctctttggggatcttggttttctcgtaggaggagaacatctttttctcccctgtcatatggtttgtgcacccgctatcgatgatccaacttgagcccccggatgcataaacctacaaaactaatttagttcttgattttaggtacccaaacagttttgggtcctttgacattagatacaagaactttgggtacccaaacacaagtctttgaccccttgtgcttgcccccaacatatttggcaactaccttgcccgatttgttagttaaaacataagatgcatcaaaagtcttaaatgaaatgttagaatcatttgatgcaataggagttttcttcttaggcaattttgcacgggttgattgcctagagctagatgtctcacccttatacataaaagcatgattagggccagagtgagacttcctagagtgaattctcctaattttgtgctcaagataactggcagggtacaaaatgtaaccctcgttatcctgaggcatgggagccttgcccttaacaaagttagataatcttttaggaggggcattaagtttgacattgtctcccttttggaagccaatgccatccttgatgccagggcgtctcccactatagagcatgcttctagcaaatttaaatttttcattttctaagtcatgctcattaattttggcattaagttgagctatgtgatcattttgtttcttaattaaagctaggtgatcatgaatagcatcaacattaatatctctacatctagtgcaaatggaaacatgctcaacggtagatgtagagggtttgcaagattttagttcaacaatcttagcatgtaaattgtcattttcatttctaagattcgaaatggtaacattgcaaacatctaagtctttagccttagcaattaatttttcattatcatttctaaggctagcaagagagatattcaattcttcaatcttagcaagtaaactaacattatcatctctaagattgggaattgaaacatcactaacattagaatcaaccttagtaattaatttagcattttcatttctaaggttggcaataatatcatgacaagtgcttagctcactagataatttttcacatttttctacttctagagcataagcattcttaaccttaacatgcttcttattttccttaattaggaaatcctcttgggtgtccaagagttcatccttctcatgaatagcactaattaattcatttaatttttccttttgttgcatgttaaggttggcaaaaagtgtgcgcaagttatcctcctcattttcactagaattatcttcatcactagaggatgcatatttagtggaggatcttgattttaccttcttccttttgccgtcctttgccatgaggcacttgtggccgacgttggggaagaggagccctttggtgacggcgatgttggcggcatcctcgtcggaggaggagtcggtggagctctcgtcggagtcccactcgcggcacacatgggcatcgccgcccttcttcttgtagtatcttttcttttctctcctcttgcccttcttgtcgtcgcccctgtcactgtcacttgataatggacattttgctatgaagtgaccgggcttaccacacttgtagcacactttcttggagtgggatttgtagtccttccccctcctttgcttgaggatttggtggaagctcttgatgatgagcgccatctcctcattgtcgagcttggaggcgtcaatgggagtctacttgatgtagactcttccttcttctccttcgtcgccttgaatgcgaccggttgtgcttcgggcgtggaggggccatcttgctcgatgattttctttgagcctttgatcatcaattcaaagctcacaaattttcctatcacttcctcaggagacattagtgtatatctaggatcaccatgtattaattgaacttgcgtagggttaagaaaaacgagtgatctaagaataaccttgaccatttcatggtcatcccattttttgctcccgaggttgcgcacttggttcacgaaggtcttgagccggttgtacatttcttgtggctcctccccttagcgaagccgaaagcgatcgagctccccctcgattgtttcccgcttggtgattttggtcacctcgtctccttcgtgcgcggtcttgagtatgtcacaaatctctttggcactcttcaatccttgcaccttgttatactcctctcgacttagagaggtgaggagtatagtggtggcttgggagttgaagtgcacgatttgggccacctcgtcctcatcataatcttcatcccccacggatggtatctgtacaccaaactcaacaacatcccatatgcttttgtggagtgaggttaggtgatatctcatcatatcactccacctagaataatcttcaccgtcaaacgttggtggtttgcctaatgggacgggaagtaatggagtatgcttaggaatgcgaggatagcgtagagggatcttactatacttcttgcgctcttggcgcttagaagtgacggacgcggagtcagatccatatgtagagggcgaggaagagtcagtgtcgtactagaccactttcttcattttcttcttcttctcgccactcttgtgcgatcgaatgcgtgaaggggatccatccttcttgttgttgtcggactctcttgatggagccttcccgtggcttgtagcggacttctcaccgccgatcaccatcttcttagcgtgatctcccgacatcacttcgagcggttaagctctaatgaagcaccgggctccgataccaattgaaagtctcctagaggggggtgaatagggcgaatctgaaatttataaacttaagcacaactacaagccgggttagcgttagaaatataaatgagttcgagagagagggcaaaaaaacaaatcgcaagcaaataaagagtgagacacaaggatttgttttatcgaggttcggttcttgcaaacctactccccgttgaggtggtcccaaagactgggtctctttcaaccctttccctctctcaaacggtcacttagaccgagtgagcttctcttctcaatcaaacaggacacaaagtccccgcaaggaccaccacacaattggtgtctcttgcctcggttacaattgagttgatcacaagaaagaatgagaaaaagaagcaatccaagcgcaagagctcaaatgaacacaagtcactctcactagtcactatttgatttgaaatgaactaaggacttgggagaggatttgatctctttggtgtgtcttgtattgaatgctatagctcttgtaaggtgtaggaagttggaaaacttggatgcaatgaatggtggggtggttggggtatttatagccccaaccaccaaaagtggtcgttgggaggctgtctgcgttggattctcaccgttggagcttctgtcttctggggcaccggacagtccggtggtgcaccggacaggcactgttcagtgtccggtgcgccacccgtctctgccctgactctggcgcgcactttagcgcatttaatgccttctgcagacgaccgttggcgtgaagtagcctttgctccgctagcacaccggacactctctggtgcttcaccggacagtccggtgaattatagcggagcggcctccagaattcccgaagttgagcagttcggagttggagtccctggtgcaccggacactgtccggtggcacaccggacagtccggtgcgccagaccagggcacactttggctgactttagctctctatatttgaatcctctctcggtctttttattggtttgttgtgaacttttggcacttgtagaactcataatctagagcaaactagtcagtccaattatttgtgttgggcaattcaaccaccaaaatcaatttaggaaaaggtgtaagcctaattccctttcaggtaccttgaggaggaaggcataaagaagaagactaggaggaataagaaggtccacaagaggcacacccttgagtttgcaccatcatccaaagagatcatccggtgtacatgatcctaagggacatcaacaagggagtaactactcgatctcgtgttgttaatttttgtgagtattactctttatgtcatctattgagcctttcaggatagaagatgccttgaagggtcaagactaggtgatgcccatgcaggaagagctcaacaacttcaagatgaatgaagtttggagagtagtgcctcgtctaaagcaaaacattgtgggaaccaagtgggtgttgcacaacaagaaagatgaatatggagtggtgacaaggaacaaagctcgacttatggcaaaaggttatgcacagtttggactttgatgagacatttgctcttgtagctaggttagagtctattcatattttattggcctatgctactcaccattactttaagttgtttcaaatggacatgaagagtgccttccttaatggactgatcaaggaggaagtctacatgaagcaaccacctggcttcgaggacgacatgtatcctgatcatgtatataagctctctaaggcgctctatgggcttaagcaagcaccaagagcaaggcatgttgtgctggtgatctttttgtatgccaaatatatgtcgattacataatatttggttctactaatcaaaagtcttgtgaggagtttagcagattaatggtgcagaaattcgagatgtctatgatgggcgagctgaactacttcctaggatttcaagtcaaacagctcaagttcaacaccttcatctctcaaaccaagtacatgcaagacaacctcaagaagtttagaatgaaggatgcaatgcccatcaaaacgccaatggggacaaacgtacatctagacctcgacactggaggtaagtccgtagatcaaaaggtataccagtctatgaatggttccttgcttcatctttgtgcttatagactggacattatgcttttagtttgtatgtgtgctagatttcaatctgaacataaggaatgtcactgtatggtcgtgaagcaaattttaaggtatttagttcatatgcctcaagttgagctctagtatcttaagggtctacctttgacctgattgggtactcagattccgactatgccaggtacaaggtatataggaagagcacatgaaggacatgtcagtttttagggaggtccttggcgtcctggagatctaaaaaacaaaattttgttgccatatccaccaccgaggccgagtacattgccgcaggtcattacgccgcgtaattgctttggatgaggcaaactctaagggactttggctacaatctgagcaaagtcccactcctatatgataatgagagtacaatccgcttggtagataatcatgttgaacacagccgcactaaacacaagacatccgacatcacttcctgagagaccaccaacaaaggggagatatcgatattaaccatgttagcaccgatcatcagttagccaatatcttcaccaagcccttttataagaggaggttttgtgagttgagtagtgagttaaatgtattatatttttggaacttggattgatttatagcatacatcttttatatgcctttgatcatgttgatttgtgttttatttcataccattgcttattttaatcaagaacaggggaagaaatttggccttgcataattcagcttcgcgtcgtaaccaccgggtcgctggagttggggtagaattcaacattcaagaactgggcagaagatctacaaaacgagtaatgaaagctttaaaagtagttggagaattggaggatattagccagcaagctatggaggattatgctaagcttttcgtgcatcctctctcccaaactcacgtggaagctttggcggccctgtttggatggtctactccagtcgatttttgtgcagattagtagagtgaggacatgttgttcttcctgtattaatggatccagaaaaaatcttgatttggaatgtaaggggtttaaactcctctgctcgccagaattcggttagggagttggtgtcctcttcacgagcggacattgtgggtgttcaagaaacaaaataaactgaagtcccgcgacgaaccatgttgtccatgcttggatcagatttttcaaattttctggttctaccttctcttcgagctagtggtgggattttagttgcctggaaacatcatctgggagcacaggccttaacagaattgatgatcacagtatctcagtctagttctgcacacaagaggggcaagcctggtggctaacttatgtatatggaccgcagagtagtgaagaaaaagttcagtttctgcaggaactaagaaatgtcagagcagcttgtcttggtccatggataattgcaggggacttcactctcatctacaaagctgaagactaaaacaattctaatcttaatcgcgcaatgatgggtcgctttagaaggaccattgatgatttatctcttaaggagatcccccttcatggacgcaaataaacatggtccaaccagcaaaacataccaaccttggtgaagctagatagagtcatgtgttctactgattgggaggacttgttccctaatgttttgttgcagagttcagcttctgaagtgtctgaccactgccctttactgcttggtcttcgggataacaggtcaggaaagcaaaaattccatactgaatatttctggccaaagctagatggtttccaggaggctgttcaggatgcatggaactcaatccctgctttggagtgtcctttccaggctctagacatgaaatttaaggcgacagcaaaaggattgcaaagctggagcgatagtagagtgggacatgtgaactcccaacttgccctagctcatgaggtgctgcataggttggagattgcacaagatgctcggtccttatcgctaagtgaaatttggctcaaaaataaattgaagaagcactcccttggacttgtctcattaaagcgcaccatcgcccgtctaagatctagagtttcttggctcaaagaaggtgatgctaatacgaaattgtttcatatgcatgcccgtcaccagaaaagaaaaaaattgtggcaagattggttgctgacaaccaggttttcactagacataatgagaaggccattctaatggatcaattctattccaatctgctgggtgtcagcattgatagagattgctctatcaatcttgaagctgtgggagttccgacctttgatttggctgctctggacttgcctttcttggagaaagaagtgtgggaaacagttaaattgctgccttcagataaggctctgggtcctgatggtttcacaggaggattttataaggcctgttggtctataattaaagtggatataatggcagcagtttcagcagtttggagcaggagatttgcgcagttcaataggctgaacacaacatacatcacattgatcccaaagaaggagggggctgataaagtaaaagagttcagaccaattagcctggtgcatagcttcgcaaaattgatcaccaagctgctagctaatcgcctagctggaaggttaaatgagatgatttcacccattcaaagtgcttttataaaaggttgttttattcaggataactacatgttagttcagcaaactgcaaggttcctccatcgacgaagacatgcccattttcttctgaaattggacatcacaaaagcctttgattctgtctcctggccttttctcatagagagtgatggtaaatgggtttccgggcaaacttattgttcatcgtcaaggactacgacagggtgatcccctctcactgatgctcttcattctagtcatggatgtgcttgggcgaatggtcactgcagctgaaggggcagtacttcttcaaccccttgctacaagatctgtgcatcatcgagtctctatgtatgctgatgatgtagtcctcttcttgcgaccaactgcgaagatatagtaataattgtggatattcttcacctattcggcgaggcttccgggctgcataataatgtccagaaatctaatgtatatcccattcgttgtgacgagagtgacattgcagttgtgcaaggtttgctgccgtgtggaatttcgtccttcccctgtaaatatcttggacttccattaacgctgcgaaagataaccaaggaacaggcgcaaccaattatcgacaaatttgcaaatcagcttcctggatggaaggcagacttgatgacaagggctgggagaacagttcaagtgcggtttgtgcttactgggattctcatctacttagcaatggcaattgatctcccaacttatatcacaaaagcaatcgataaaatccgaagaggcttcctttggagaggtcgcaaagagattaatggggggcattgccttgtttcttggagcaaagtttgtcggcctcttgatttgggtggtcttggtatttcaagcattaaggagctgagttgggcgctgcggatgcgttggttatggctgcaaaaaacggatcctaaccgaccttggtcatccttgactatccaagttctggacaaggtccaggccttcttcagtatggtgatgcaaacggaagttgggaatggtgctaatactattttttggaaggatcgatggattcaaggacagagggtggcagatattgcgccaagacttcttcaagttgttccgaaaaagaaaaatcaatacaaggacaatgcaagaagctattactggaagagcatggatgtcggatattcgaggggccctatgtgtgggggcaattgttgattatcttcacctctggaacttactgttaactgctgaattaaggccgaatgttgaagataagcacattttcaagctggctgccaatggaaaatattcagcgaaatctgcctacgaggggtttttcattagctcgattccttttgaaccatacaagaggatatggaaaacctgggcgcctcctaaatgtcggttttttatgtggttagttgctcaaaaaaggtgttggacagctgatcgtcttgcaaaaagaggattggatcaccctgatagctgccctctttgtgaacaagaaagtgaaacaatagaccatcttctggtcacttgtgttttctcaagggagtgctggttccttttgttgagacaatttggactgcatactctgtcccctcaaccagaaaatgacagtttcctggactggtggaggacagtaagtgaaatggcagctggacaaatgaagatggggattaactcccttgttttgcttggtgcatggaccttatggaagcaccgtaatcaatgtgtcttcgagggcggcaatccgagggcttattttcctagcagttaaccttcctcatggctaatttctgttcaaggttttgttgttttttttctgttttttgagtttaaacctcagtgttatggtttgtaagggcttcggcccgacttttttcttcttcttaaatataatgatatgcagctctcctgcatattcgaaaaaaaagttatagaatgtcatctctggacctcaaaattccaattgtaatgatgtacatgtttagtgagatatgagcatgagcacaagtccacttgaaggcaatttgaaggtttcaagtccaaaagagctgaaacaaggggcttggaaatgcaaatgggagtaaatagtaaatatgtgaggtttggacccttagacatgttgcataggcctattacaatgtttctagcatttgcatttggtctctaactccttttgtagcaaaaagtgcattttggacttggtttgagccaattcaggaactctattgaagatttgtgaaagaggtgagtttctcacacttagtcaattggattatgtgctaattatgtctaagtcgtagggaagctcccaaggacaaccaaaaagaattggagaagattggctcaaaagagcctaagttgggatatcctaggcctcactggaccggtttggtggcacaccggaccgagtccacaggggcccgagacttaagagttctggtggcctggcgtactggaccgcttgtatggctgaacagtgaactcttgagaattataatttataattcattgggccttcacttttcatggtccggtggcacgccgtaccgtcctccaatggctacttcgcgggcacgtgcgctggccaacgactattatgcgtcccagtatagaggtgcaccggaccggtccggttcctgttagctatggaaaccatccaatcacatctcaaactcagggcacatggactcggtccagtggtgcaccggaccggtctagtgtccccgcagaagactggatttctacatctttttaaacgaaaggggcaactgctatgggcctttcggggctataaaaggaacccatggcacacctcttcagcacataagcatacttagggcttctctacacttctatactctgccacaacacatttgtgtgattctagcgagattgcgctcttgagatcttctctttcgtgttgtgttgctggttttggctcttgtgtgtacttcctctcctttattgtgctaaagttgcaactctgatcttgtgtacagctgcaagcaggggcggacccataggggggtccgggtgggccctagcacaccctaagccaggcccaccggggaccccacccggccatcccgttcgcccgttcagccgacgcctgacgttccaacttctctggttctcccgagcgttcggctaatcggcttcctcttcccagttcctggcgagtgcgctgtgcacggctgttcctcagttcctagcggctggtgtatggccaccggcgtcctgcaaggctgcaacagcatcttggcatcttgctcgtctggacgcctgctcggtcggctctagagccttcgcccctccggtcctgcaaaggctgcaagtctgcaacacatcttgcttggtcttcaagcaaccacatcttgtaacggcatcctgcaaggcttgcatggaacgcctactgcctgcgctcagtaacgctcgcgcggaggtgcccttccccgcgtacaggtgcgcatgaacatcgcgcctctcggctgattcactatcattatttttatagtgactaaaatatgaagaagcagggagatattgactcttttttttccaatcatgctgcaaagaaacataagtttattgtgtcgacacctaaaaacaagaggaagagaggataaatgaagaaattgtgaatccaatgccatctgcaccgccaccgccaacactttatgatgtcagccgtcttccacatgatctaagtgaaagacaacctattgcaagctaccatgctaatgatcatgatgcaattggaagagcatatattattattattagaggtccatttcaaccatatgcacatgaattcccaaataggaaaattggagatagagatcgccattttaattttgttgcggcacaccctatacaaaaatcctaggtccgccactggctgcaatagactccaatttgtggagattccttgcgagaggatattattgatataaggaagaccttgtcactcaagttcgatctttggatcaattgagagggttgaaagcaacccttgtctaagaggataccacaacgtggatgtaggcaagcatttcaggcttggccaaaccacgagataaaatcgtgtgtgttacttgttcatttactttcttgcgattttctttctttctaagttctccaaattcatttgtaatattgctcttagtctaatttacatcttgaaagagcaatcaagtgaaaatgacttttctctcttcttctctcttgaacttggtttagagttacactaacctcctaactttggactaagtttgagtttagagttacactaacctcctctctaggtgctctcagaaagtagaatccaaactggattatctatagataatattcacccaaaaaataggtgtgcatctcaatataggcaataagcacaacaactaatcctacctctcccaacccttttaagcactcatccacccaacctaggcggccagccaccagccgccccgcccaccaggcaacgtgtcactttgtttttattgttttgtatggttaaacaatgttgtccttattacatgtcagatttattggtaatgtattgtcgttgggtgtcgtgtagctagtaatgtcatataaaatataatgtgataataatttttttatcgaggataaggacccattggaaacccgatacccgaatggtgataggtatgagatgaatcttatacctatgatgagtacgagtatcgggatgaggatggttatagctttacaaggatgattatagataggatgtccaaaccgagtggtggattttccattctatggtggtaccaaccacagctgcagtgaacatttgttctggagacggtggaatacttgtcggccatactcagaaggtgcaacacaacatgagcaactaactttagtggttgacgaagagtttgacttttccatttctggagtgcatactgggtccatgggtaaacccgaagaacaaggaaagcacttgtccatcaattgcacttgagtagcaaaggtttcaggttgtcggtgctgacatctcttctactctgttaagaccaggctaagggggtgtttgaatgcactagaactaatagttagttggctaaaaattggtagtggaattagctagctaacaaataactatctaactattaactaatttaccaaaaatagctaatagttgaactattaactaaagtgtttggatgtctcaactaattttagctactaactattagctctagtgcattcaaacaccccttaagtgaatgtcatggtatgggctgacatttcgagaggtggagagtgtcatggtatgggctgccatgtgggccgagagtccgagaccgggctaaatgagctgggctgaataggactgactgcaggtagaaaggcaagcgcaacatttggcaccgttagctctccactaaacttgtcagatgcaataatttatgtttttattaatggcaaagccctcctgccagccagtgccttccttccgggtcaaccactggtacagtcacatcacgaattcccactggcagtacgataacctcactgagcggtagggcctcccgtcccagaatcctgcaggacccaccgatcatagccccacgggtcctgctcctgcgtgggttccagttccaagtcgcccaccgtgacgcccatcgagtcaaccgaacccaagccgtgtggcgactggcgaggcgagtgccccagttcctaactccggtgggcgcgctcccaccgccgcgcggctcaaaacccgccctcagcctcccgcgctccagtccacacgggagcgggtggtgtcgtctgaagcggcgcgatcaaggagccttcgagcgctccggtgagctatctagatctcaacatcctctcccctctgtagtctgtagttgtactctcccgcccgatggttcagttaagttatatcctctccccttatttttactcggtcgataccatttcgttgtggattgaaatgctgcggccctgtactatgaggatggttcctagttttgcgtctggcaatttggggcgtacatgcttttggctgcgtactgttactgatcggagaaaatgtttgtaacgtatgattcgtttttcaggacgtaacgtgctggcggttgcttatcgccggatatatatatataagcggaaatgttctccttgttctatggcctgtggaagtatgtgttcgccaaggacgagttccgtgttctgattcttggtgttgacagagctggcaagacggtagctgctagctcccagccttcatatatatatatttccctttctgaactagaaattgatgaaacttacctgtacacaatgtttctggaaccgttgccatagactttgctggagaagttgaaatcgatatatctcaagggggaaggacttccgcctgaccgtgtcgttccaacagttgggctcaacattggccgcatcgaagacgcaaaggcaaaacttgttttctgggatctaggtggtcaggtaagaacgtttacgtacgtagtaaagtgagccttctgttgccgtggcaccaccctacgatcgttgatatttgagtcttgtcagtttggtgctatatcagggtttctaatgcctgggaaatacatgtcataaaatcaaattactaggatgtggttgctttagttattaacctagcatctttttgcgttccagcagaatatatataatctagttatatggaatgctcaatagaattttcagaaagcaaagatatgctctgttggctaacattcacagtactcaatagaattgggtggctagtagaacagcatcagcttctctgctatgttataagaattagtgtaaaactaacttcagtatcactgcttgctagtatgataattaagcttccatgccaagttcagtatttcttacacacttgcctgcttggcaggttagcctacgaacaatctgggagaaatactatgaagaggcccatgccataatgtacgttattgacgctgccacagcatcgtcatttgaagattccaaatctgctttgggtaaggttcttatttgtgtcaattataaactacgccatccattccaaattataagacattttggcctttttctagataaataaattttgctatggacttaaatattaaaaatatatataatgtcctggtacatagttaaaacaatatatctagaaaagctaaaacatcgtcttataacttggaacagagggagtactggtttgtttctattgctagatctttccagaagatgcaatgcctctctggtaaatgggatgagaactcattctagagaacctaacctaaatttcttacttcagagaaggttattcgccatgaacatctgagaggagcaccactcttgatagttgcaaacaaacaggtgaagggtttacttccactttctatattttgtaccacagtacataattatgattgaaagatttagtgcttacaataaagttgccatcgtagttaaaataaagattttgtttttgtcatgtgcacatgctgtgaggcatacaaatataaattcctacgttgcaaagcgcctatgcgccattgcgaggttgaataccagatgtagtttttaaatcaattaaaacttcctgaaaagatcacatggaaaccaatgactacatgcactgtctgtttctgttaagctgggtacacattattctatcaaattgtttattatttacctctagcttgttctcatgtttggagggtgcttctggatttcttttggcaggatttacctggagccattgatgaggaagaattggctaaatttctgcataaagaactggatgagaggacatatacatttcaggctgtatctgcatatgatgggtgagcgcagaaactcaactggttcctgaggaaatttgactcgccatgaaaaaaatgacaattttactcaaagatacaaaaaaattcacacattcgtctgttatattgtttcctgggtgcatgatattctaaagatctgttatattgtttaaatgtgacaccggctcttgcaggagggggatcaaatctggcatagactggctggtggaacaaatggaaaaaagcaaacgtaccgagacactgcaggctcgtgctggcgtagctggacaaatttagaatggggtgaatttgttaaagaacaaagcattggataggaccgcttccttcgtatcgcgtaagcagccatttgctgcattccgggattatcgttccaggtcgcccagagtgctgcaagaaatgtttggctggttgctcctgtggtggtggtgattggtgaggcgattcgtttggtattattgaggttgcattcttatgtacctaaaggtcgcaagcatacatgtttatatgatgcttttcaattttcgtagcaaactagtagcttcaatacagaggatcaaagagagccgtgttctttaacttgtttgtgataaaaaaaaggaagaaaggaaagcgaagaaggaattattggtgcatctgaaagtctttattgatatgtctaaaccatttcaaccgatgttggatgaggttttcttcgcaccggtgttacatctagtctatcatatgtatcgtcgtttcatactcgatccttttttatggccaaactccaacacaacatatgcatttctgtagcgcatatgtattgaacatgtcttttttagactaacattttgcaccgaacaacatagcagatcgaattgtcatcctataaaacttctttttaacttttgtggtatcctattgtcatatagaatatcaaatgtttggcgctacctcatccattgactaatacctttatcaatatctctacgtagcatagatcctaaatatctaaagatgtccttcatggacactacttgatttttcaaactaacatgtctttcctaatatgtagtagcatagatcctaaatatctaaagatgtccttcctggacactacttgatttttcaaactaacatgtctttcctcatatgtagtagtgttgaaatcacatcttttatattcaatttgagttctactgatcgagtccaaaatcgtccaaaacctttaaactctagaatctcccaccacaactctagttttctatttactcgtgcttagctttcatcaactaacactacatccataaaaaacatatgttaagagatatccctttgtgatcttatccatagactcagctaattttttatgtagtcatattctaatcgaaaagtcacatgtgtctccatcatttattcaaacatattcataacattgttgttggaactttgcttcctcaaaaaacagggataaaaaacagtaaaaggaattggcccttcaggctagagctgctgatatccccactaagctgggccaatcggccaagaaactttgcttcattcagggcatgatatggacaacccactgcggattgccaaacaaagaagttagtaagaaaccacaaaatgcttagtctgagctttgaagagttctacttggtgagtaaaacagttaatcttaactactgcttggctaagataagatgttagctaaaagaattctgtagatgtgcaatctcaaaccaatctgcctttgcatcatttagaaaactgctttaaaattcgaaatattttgcttacaatagctcatagcacagaagaatattatagaacaaaccaaggcaagtgactttctgaaacacagttttcaagaacaggttcagattaaactagataacaggatgccagcgttggtaataagtctactccccaagagaagtcactgttttgttctttctcaatgaaaaataacgacacaaaaatgaactatggccgtctgcattaatatggatacgcagcaaaaatggacatgagtaactcaaaatcgtcaagtgcttgctatgttaagcacccaagtcaatgatttatattccatgatatcgcaaagattatctataacaagttctgagtgtgtttcaaacattaaatgatccatgaaaggtaagcacttgtatttagcggacagtactagtctgctgtgggattaacccattttttatggttctcgatggccttttgcttcaagataatatctgatccaattaatagacaaaatcacaagtaatctttgttacatgtcatcatcgaatcctatcttctgtaggagcaaacttaaacggtgacatatcaagcaacactatgagaattcatgtgtatctgataaaggatcattcacttcacatgtagacatatatgactacaaaagtggtatgaatattgttaacagaatcaatggaaaatggaatatatctcattaggtaacatatggaattgtaagcaggctataaaaaatcagaggtattaagtatcaattcagacagcagaatgatgcaatgatcacaaccaagtcaacaagttatcataactaagattagtccttttgtagccaaagaagtttaccgaactcagaaagcagaacataattcacttacttgatctcaacaacattttgtgtcaccatgccaggaagaaaccagaagtggcatggtaagcattgccagtccaaccagacctctgtgaagcattatcccatcactggaaacctccacaaagcgtgtttgctaaggcaaatggcatgtatctccatctaatgaacatacaaattttgccctgcctgatgttaagtaactacaggtaccaggtagactacaagtctacaactacaacattacataacagggatggaacaattacactcaaatgaacacttgaacagcaagagccagtctctgagacatctgcttcggcctggctaatcatagccccagtaaaccataacaacagttaaatcatccgtccaagattgtccaccctcaagaagtgcatgttgtgcaaattccccaatatatcctcagatgcatcaacatcgatatgaaagttgctgatatcttcaactccgccagcaccgctaacattaaccctaccagtgccatctgtagcatgtgctgcctcatttatgttaattctcctcacctcctcggcccttccatctccagcgttctcatccccagcccagccttcctgcccgagcatcgaagaatcaatgccactctccacaccaagagaacgtctcctgagccctaccccgaccttcttgcgggccgtcgtcttcttgatcctacctctagaagagccaccacgagcactgtcattctgtggctgcctaccaccatggtttccgtgactcctaccaccaccaccttggccactgggagccgtgttccaaggaaacatcttgtagaatggcttccagttggcacccaggtcggccgcgttgggaaatccgagggggaagaacccccaggcgcagtggtacatttcagtgcccggcacaacggtgggtggggtcgggagctcagaagccacgaatccgcggcggcagcccgcgttggggcacttgagggcgcgcccgatcaggctgcgcgggtactggtgcacgtagcagcagaaggggcacgccgtccagaactccggggtgtccgaggcgggagcggccgcggcgggatactgggaggagtaaggggtaccagtggcgggatcggcgggcggcggggggcggcgagagggatccgagaggaaggcgtaggcgtcgttgacgaggcggagcgccatctcggctcccgggtgcgggttgctggggccgaggaggagcgcgaggcggcggaaggcgcgggacacggcggcctggtcggggctgactccgggcggcagctggaggatggcgagcgggtccggctggcccgaggggcccatgaactgggaagcgaggaggacgtcggcgacggcgaggagctcgtcaacgccagcgaggagcgggttcgcctccatcgaccgctccgcgaagcgcttgcagccgacgaggtcgcgcgccgcgaggagcttctcggcgatctccagccagcgctccgcctgcgcggggccgtcgctggcgcctccgccgcccccgctcacgctcccgccggtggagaagtccatggtttgggggaggaaaaggtggatgctgtcggaggcagctggtttggttttggggagggggaagatcctgctgcccgaggggctcttgactggcgactgtctgtcagtccgagagtattttgttgggcagcacatttattttaaggacaactgtgattatacgttttcaacttcgtgaattattgattacgaaaattaaaaatgaggggtaaaatcataattgtaagggaagagaaggatatactcaaaattaatctgaaaataatattaaactttttatggttaattgtgattatagccttctctcactttacaattgtgattttaccccttatttttatttttaatcactaattctgatttttattaacgttgataaggcggtgcaaacaacggctttgttttcaaaacagaggggtaacaaagttaaaaaagaagggataaaatcacaattaaaatattagaaaagggtataatcacaattatcccttgattttattaggctctctccaatcattctccatctcaaatcccacatttggactttctattcatatttaaatatcctcatcttcactattatttccctattttacctcctctccaagcatccctctattcagctctccctttaccctttaactaagctatttgacttttctacatcagtttttagagtttttaatatttataatatcataatacacattgtcacttaaccaaacttatagcagattaattttatagttaaaaacactaattagtgaagagtagggttctatctttctcgttttacaaggtgttttccttctctcaccctacaagagggaggagagggacctgttgaagctctctcgatgtacgaaatcaccgaatacgtcgtgaaggggaggggaaaggatccgttggagagcgtcttatagcctgttagcttcgaattaaagtcagttgtttagattattgtagctgcaattcacagagaccaaaacactacagaaatagtaaaagccgtttcgaattaaaaccaagggaacgggctattagttttcccatatgcaaacataccagaccattgtagcgccccaccgcagagcaagttttgcatacaatcaatgtataattggactaccaaaaaccataaaaaattctaaaaatatataaatataatttattgtttactttattagattataaaattttaagtttaaatttatacaatagtaaaagaaaaaatatattcaattagataaaaaaaattccctcaattccgtaaaataaggcctgcattttaaaaaaaaaagactcaatgttttaaaacttttgactagtaattcagccaaaagcatatattttagtatatacatgttatatacttgatttgtattcaaaaattactttaatttaatgctcgttatgtttttattgatagcatattttgaaataaacaaatagtcaaagtttcgctccaaagactgtaccaaaaatatataccttgttatataagatgaatgaattatatattaacatagcataaatcaatctaggatcttaaatatgatatattgataaagtaaataatatatatgtataattttttaaatatttttgtgacttttgatagttggattgtatagaatgtttggttgcacaatagtattttcctcaagtgaaagatcttcatcaatgttgtaatacagtgacatgtcatcatcaagcctggttagatctatcctcaaaatctactccataaatttaagggccaattccctgtatgccactagaaaatatactcattccttgtatgccactgaccccacatgtcatagacaccaaaaaatatacctatatgccactcagtggcacacaaggaatgagtataaaatttgatggcataccaggaattttctctaaatttaatttagagtttctagagtacttctcttttaacttcaccttttttagctacacttgtttggttgaaatatagagccgcacagtcccaaacaaactctaaggatgagttgatgtatccccaagtatatcttacaaaaaatgatataatgactctatttatcttatagggtatttgtgattataccctctctggtcttgaaattgtgattttacccatcgtttttcaactttgtgatattttatcccttcattttgaaaacgaagagttgccatacccttgtgccgttagatgcagttaacaatgttaaatttgatgcaaaagataaaaatacccaagcaatttattttgattttaccctcgttatattatgtaatagtgatttcacccctattagggttgtgcccataaagaatagaaaaaggtagtttgaacctttcacccatttattttctcatttttttatttttaatcactaattctgattttcactaacgatgttgagagtgaagggcaaatggtagcttcgtatttaaaacggaggtgtaaaattagaaagttgaaaatgcagagtaaaatcacaattgcaaggccaacgaagggtataatcacaattatctcttatcttactagtagtaattattagattgtgaggaataaagtaatggcagattatttcattctattttataaaccaaacaaaacttggaaaagtaaaaatatgatggagtgtatgtgggggtggttagggaggaaaggcccaaaacaaagggttttcgaatcttacctaaataaaaatcatggcaagctaaattgctaaaacaagaatctaacgtgtttgtttggcacttgcataaagatggtatcttttctattaattatatgtataaattcttagttactaatggaattaatgttttatgaataatttggtgtctaaagatacctttaaagataaaaatcttcatgtagttctttcaaaaaaagagggtcattctcacaatctcacaaaaggtaattttatcaaaaagaaattgaaatagtgacacaacttgctcttttgagccacaaaccatctgatacatattttctttgagtgcacttatgctaggttactatagagagaagtttatatttttttttctcgaacacgcaggaaaactgcgcatcattatattgaaagagagaaaggtccgaaatggaccaaagtacaaagccaagcaggcaaaaaataaaaaggaaaaatagtacagcctcatgcactaggaatagccctgatcctagcaaaagcagccagaagtccgagactctcgagctgctttgcaccagccatataccagcattccacctcatccatgaaaagcctctgaatggtgctcaatgaagggttgacaccatcaaaaaccgccttattgcgatgtagccataaacaccaggcccctaggataatgagactatgaaaacctttttctgatatgtttggggactctcctatgcaccttttcccaccaatccacaaaagagcccgcctctctagtaggcgtaagatggcccatcctcaaagctgaaaatataacatgccaaaattgtctagcgaaactgcaagagcacaagaggtgcaagatagtttcctgctcttgatcacataatggacaaaccaccgggtgcggtagtcctttcctctgaagtctatccgcagtccaacatttattccttattgccagccaaacaaaaaatttgcatttggggggtgcccacgacttccacacccatttccatggctggaatgaaataactcccataaacaacgccgaataacaagattttgaggagaaaactccagagctcgaatgcacccacacatgtctgtcctcctcctgattaagcaccattccacttaaagcatcccacagctgcaaatactgttgtagaccaatcaaagataaaggattcgcgatatcacaaacccattgccaattatgcaacgcctgagcaacagttctcgaattaaatgacctgctactcaccatacttacaacttcaggggcaaaatcttgtatcctctgcccattcaaccatctgtccgaccagaaaaaagtatcggtccccttcccaacaacagagaccaccgaagaattaaaaaaatgtctaacttgctgctgcacggggatactcaaaccaagccacggcgagttggatcagtcttttctaaccagagccacttagcctgcagtgcccaactcttcaattgcaaattaggaacaccaagaccccctaaacttatggccttgtcacagtttcccagggaacaatacaacttccaccgttcacctcctttcgccctttccaaagaaactctctttgaatcttgtcaattgatttaataacccatttaggaattttaatggcaataaggagataaattgggatggtcgataagacaaaccgcactaatattgtcctctcggctaggttcaataaacgagccttccagttagggagtctgtgtgcaattttatctatccacaacttaagatcatttctcttcagcttcatgtctgagattggcagacccaagtaagaacaaggaaatgaggccacactgcacctcagcagtcctcttgaaccacatgctcctcatatctgataggaatagcataactcttattcatattggtaaccaatccggaggccgacccaaaacaatttagaatcaatctaacacatttcagatcttcctcaatgggtttaacaaaaaggaccacatcatcagcatagatagaaagcctgttacggactcctgccctttccaaactgtgcagcaatcccctatattcagcagtcctgaaaagactgctaagcacgtccatgatcagcacaaacaacatagatgaagacctctccgccactgaatatccaaaactgtttcaatgattaataccctacaaagatcccttttttttggacatgacgtctgtgatctgttgatctatctagctaacaagaaacgaagctgtcaaaatttgacaactttgctgaccaaaatctcttgtatgtcattttcagtcgaatgcattggcttggatcttgggcccaaatacaatgtctgaggagcaggagccgatgttgcaggcattccgcaagctagagaatgcggcaatgtatttttcacgttatttggcacgttatttggaccaagatgaagccagatacctttctattattaaaaaaacaagttccggcctctttacaatattttgtaatacgtagatcatatatgtttttatcggatctttttctgtaaaaaaattggagactgttgggggccttcggcttccgaaggtcctcaaaaacgtaatttgactatgttctccaaaagaaatatgtgaacaggtaccttcgaagtcaagttgcgagcatacaaaagcatggttaggacgaagcttaactgggacggcaatcacgatgaaggataagacgatcacgaagctatgcgcagaagagcttcggcataacggtggaaagggaaaccgacttaaagatgaaaagctagattaaacctcgaagaattattatagagttattgataaatgtaaaggacattaatgtaatcttgcatgggctgcgacccgtgtctataaataggtgaacagtattcccgtactgttcacgcagacttggcattcacttttgcgccacgtctgtattcttttccttcaagccgaaggtacacttgtaatttaacattgttcacacaagtaatatgaatgaaaatacattaataataatgtttatagaaattatgttattttctgtactttatttgaatgttctccatattttatcataatcaagagagtatgtccttcatgaccttcgtcctaaattcgttatatccaaaagagagataatgatttgaaggacgaagtgctttgatatttaacattttatgttgtcttgctcttgattcatagcatttgagagcaagtccccaacagagacaattgcatttttaggactctaaacattgtgcttcacacaaatgccatttaaaagattttcttcgcaagaaaaggactacaaacattttataattaattatactaccatttagtgtatattcttcctttttataatataatcttatgtattttttcaggtatccaacctataccgcacttcaagaacgccgaatggtcctccgggaccttgcgctacctgcttcaacgcctcctttgtttttggcatacaccacatagagtcagtcaactagcttgctggcgactgggttatgctgctgatcatgcttagcgcgatgcagggctggtctgcaggcacctgcaatgcaatcagagagatgatcccacgagaaaacaaataaggttttggttcatccaaacctaagaacctcccactctcacagacatgggaagcagatctcagatgagacggcacagttagggttcagacttgggacttacatagtgccctgctccaagaatccagtagaaatgcaggttcttgtgggacctgacaaaggccttggtgcccttgctggcgccacagtagaggggctgccttggcaggctcaggaaggtcctcagaccatcccatctgaaaacgagcaatccagatgcatcgttgaaatcctgccagagaatgggagggaataggttgccaaaaaaaaaacttacttgagcttctgaacccatgcttctgctccgttggtcgagcagattacgtcgagcttcagatagaggaaaagtcatgtatatatcaagttcagtaatgaaaaaaatgcagtcttattagtaaatgctaataatctcaatctcaacttcgaatattattagtcaatgccaatcattcactaagccactatccaatgaccttatcctggtctgtcttctagttttcatgatctgtgttttttttaattacaaagagtggacggctttatagcagataggatggcagtgtaatactaatcgaactaacagatatgcaggtctcctgtatattcgagaaaaaaaagagtagagatctatcctcctttttgtgaggggctgtaaacatactgttttgcagccgggctgcagcaaatttttttccgagtagttttgagctgctggggatcgtaagaattgaagttgcagactgttactgacctggccattgtacaccgtcacattaatgccataagacagcagctcatcaatctgaatgagaaaatgaagagggattaatttcagaaactgatcgagggcgcttttcatttatctgctcgaccagtttacctcatcgatcctcggtttcatgaaatcgttgaccagcgcgttgtagaccgagtcggattgctgcccccacctgtagacgtttaatttggaagcgcagccagcgtcacaggcagcattacattagcagcaggaaaccggctgtgacttgtgatgcgatatgagcactgctatggactgacatacgtgaagttcttggggattatcttgagcttttgcttgatgaccccattcatgatgccgtcaatggtgttggagccaggctgggagtcctggccgtacgtcgagtacttcttcatcgcctgcaagctgctcatcagtgatgaagaacccacgggcagcagtgccaccgggtccatgccggagtcgagcatgaaattgtaaacgtcctgccaaaaaaaagagattgcactgtagattatattgttcgaagagtgaagtttaaatataagaatgaagataagtaaactagccttacgacgttgccgctctttgtgtcgatgaaatctagcaggctgctccatgacttctgcgaggcggcccactgccccgccacgatttgctccttcaccgtctccgccttcctgaactcaaattcgcatgcccatatatgtgatgggggtgcgctaagcgtcaagagaaatttatgcatgcaaatggtggtggtgcagtgtgcgtgttgttgctgccttagagggtgtttggtttctagggactaatgtttagtccctagattttattccatttttggtccaaaattaccaaatatagaaactaaaactttattttaatttctatgtttatcaatttatacactaaaaaggaataaaatgaagggactaaacattagtccctagaaaccaaacacccccttacttgtttgcttcgtcgccggcgttgtcgtccagcctcgacacgctcagaagcagcggtgtgtaggaaagctgcagcagcattcaggcctcactttaattatcacatgcatattcatcatttgtgatttatccaagagaacactagtacagaacaagtcttcatcttttagtcccgatcagatggaagcattagtctcgattgaagctaccaaacaagactaaaatcactggtctaatttagtctcggttagtagcattagtctagatcaagccaaacctctagaactaattgttactggaactattattagttgaggatgttctaaatctaaagctaataccctagattattctgataagctatccacgtccctttttctaataagctaataggtagaaatggttcgaagcaatttaatcgtcaatcacttattagctggttttagctaggttgggatagctagttttagcttctagctattaattttataagtttggatatcctctagattatataattaaacttaaataagttaaagggtaaacaaacaatatagattattatttggcttttagataatatattagtacatgctacacgctagtttactaaaatagctaatagttaaattattagctagactatttaaatgtttttagctaattttatcagctaactattagctctgcaacgtagccgcagtttatttctgcactaacgaaactaagaacggtcaacctcaccgtgaaatcctccggcgagatccagctatctccaaccgccacacctgcagcaggagggaacgagaatttcatcgagtcagctgctctgctctgctctgctcccccaacgtcgatttggttcatcgagtcggagcccggagatggaacggaagcaaccttacgaacctccgagcgtgacgttgagctcgccagcgcggacggccctggcgatggacgcgccgagcgtggcggcgtacttgccgccgtaggactcggcgaccaggaacagcgggctgctcgccagggtgggcacctccttcgccagcgccctgaccaccgtcgtcatgtccgcggcctgctgccagtcgctggtcacgaacaggctgtcgtcctccacgtagctgtaccctgtgccgaccgggttgtcctgcgcgcgcgcccggccatggaagaagtcggtcagtgaggacatcacgacagcgaaaggtgtagaagaagagcggggggcagaagagaggatcggagaagagagccgccatcagctatcgctctctggtctgaccacaaagatgaggtcggccttgtggagccacgtcgagttgcgcggcttcaggtccacgtccagcggccccatctccaggaagttgccgagcccgaccccggacgcgccctgcgagagggacaagacaaccatggttgattactcgctcttgctcatcaggtagctagaccgtgctcccgtaatgaagcacagaggccggatcatgtcctcctgtgccgaagccgagaaattgtggtggtgtgaggagggaaagagagaacgaggcagcagctgcctaccgggccgccctgcagccagaggaccgtgggccatggcttggacggcgtcgacgtcctctgcgggctcttgtagtaccaccagaacaggtgcgcctctgcgacaaggcggcaaagcgtcgtcaacggcgacacctcgccttcgacgaagagaggctctgaagcgcaacgagctagggagggggtgttacgtacttggccggacctcgacgtacccccacagctccgactcgtcgggggtgccggcagtgatggacgcggcggaacaggcgcggagcgagacgaggcagaggaggaggtgcagggcaagcggggagtagcaacgcggcctgtccatgtcctcgaactcgaagacgcgagtgatgatgatgatgcacgaccgggggcgtggtgggtgtcgctgtgaggcgcgctgtgggcctgtggccaagagggcgagcgccgagacccgttttaaaataggtgaagcgttgtttcgctgacttttttttttgtattttgacacttttttggaaagattattacaaatatgtccttttaagtttcaattaaaaaaatagacctttacccggcgccattattattagtaccgagtttgcacgtctcgcgcggcaatatagatggcgtcgactgtcgagatctcactctctcacgctgatgtggcgtctatgtgacatgagatcggcgccatggtaattggcgccgaccctgttttctatgcccatcaaagtccgcctgctttatctaccgtctgtcatatggtatatcacatcatgggtacaatcatatatacttttccttcgatgccactggggagagagaacgaggagagagagtaggcactcgactactagaaattgtttttggcatgatgccgtgttgtttaattggggcagggagtatagagcctagagggagatatacagaggtgtccaagcagaacatgacgtgtactacaatgtatataatcaaatccttttctcattgaactaaatataacaaatactaaaaatttatagtagagttattttgagatgtgaaagattgataacgatgtttttcatatcgcgggtaaaaatttgagaaggaaataccatgtgcacatgttcatggagacgtgagagatgatgtgatagaaatggatatggatggaacggttggccggagagggaccattcttcttattgcgattattgtcttcttaagttctcatattcacttgtaatattgctactaagggggtgtttggttacaccccgctaaaatttagtccctgtcccatcgaatgtttgaacctccgttccgggtattaaatgtagtcggattatagaactaatttgtcagccgaagattaaaagacgagacgaatctagtccagttggttgggtctatatttcatactcctatttaaaagtcaaacgcttgatgtgacccgggctaaactttagcaggagcaaccaaacaccccctaagtttaatactcatcttaaagaagcaatcaagtgaagagttctcttttctcctctcttctcatcctaacttggttttagttctcgctaacatattttacaaaccaagtttgtgttgtttaaatctaattttgcaagatcacctattcatcccctctaggtgctctcacacaccgccttcttccatattgtctcctccgccaactgcaacatagccaacctagtctcccatggccgacaaagccaaaagctaatccctaactgttgggttgttgcagatagtatcagtgagacactattgtagattcaaactgaggtttcgatcgaggttccacccctctgctgccgcaaccgcatgggactcgccattgtctgcctctggccagatccacacttgtctaggtcagatccaccctccccaccccagatcgtggtccccaacccgagctcgcttctctgttgggtcattcaagctcgttctctaagaaggaggcccaaactcgccactccaccaccccgtccacgatcagatcgaggaaggagagtaaggcgccagtgtggaaggagagcacttgcctagcctcaagccccacgtttgagctcgtctactacccgttctcgaatgcatgttcccatctcgctttatgtagggccactctcttccctggattggctctcgccactagtggtgatgactgatcttagcgccagtagagaccccgtcttcagcagtcgccatctggtctacccagcatcatcacgtcgtcatcgtgggtcctcccttttcagaccatgttgctaataccagcggatgttgttgcaaggagtaagtcagagagaatctttgactttaagagatgggctcggggcagatgttatcgctgccttgcacacgaccaccaagtcagatcatgtaagaaatccttctgttgcatccgatgttgtcaccctagtcattacgagcgacattgtcgctttcggccttcctctcctgcccattgagttaactcctcaatacaatgtgaccatcctcaacaaacaatgacatgggatgaggtagtggccaagccttcaccaagtacgttgtcagctgacgccgttgcgaagtcttaacctaaaaatacatatttgtagatccaattgcagtgaagtgataaaaaagatggcatcatacacacaggtggtaagttggattttacaacgacagtcttctttgctttctatgaatgactctttacttttaggcttgtgttgattaaagatgtttgagaactttgtatccttttatatggccatccttataataagggcatgtttgcattcatgaggcaaacaatttgctggctaattttagcacattggtctccaaacaggttgactaataaattggctaattgttagccggagggctcacaaactgtttgtcaattagccatttgaccttgctaatgggtgctaatagatcgtataaagagaaaaataatatctattagccgagaatccaaacatactgaaagtcacctagagggggggtgaatagggcgaatctgaaatttacaaacttaattacaactacaagccgggttagcgttagaaataaaatcgagtccgagagagggtgcaaaacaaatcgcaagcgaataaagagtgtgacacgcggatttgttttaccgaggttcagtctcgtaaacctactccccgttgaggtggtcacaaagaccgggtctctttcaaccctttccctctctcaaacggtcgctcggaccgagtgagcttcttcttctcaatcaaacgggaacaaaacttccccgcaaggaccaccacacaattggtgtctcttgcctcggttataattgagttgttcgcaagaaagaacgaaagaaagaagcaatccaagcgcaaaagctcgaaagaacacaagcaaatctctctcactaatcactaaagctttgtgtggagttgggagaggatttgatcacttgggtgtgtctagaattgaatgctagagctcttgtatgtagttggaagatggaaaacttggatgacttgaatgtgggggtggttggggtatttatagccccaaccaccaaactagccgtttggtggaggctgctgtcgcatggcgcaccggacaaagtccggtgcgccagccacgtcacctagccgttgggttccgaccgttggagctttgacttgtgggcccgccaggctgttcggtggcgcaccagataagtcctgtagactgtccggtgtgccacccacgcgtgctatgtcctctgcgcgcgcaggcgcgtatttaatgtgttgcagtcgaccgttgcgcgtaaagtagtcgttgctccgctggctcaccggacagtccggtgtgcaccggacatgtccggtgaattatagcggagcggattcccgaagctagcgagttcagagttgctctcccttggagcaccggacactgtccggtggtgcaccggacagtccggtgaattatagcggagcgcctctagaatttcccgaaggttaggagttcagcgtgaagtcccctggtgcaccggacactgtccggtggcacaccagacagtccggtgcgctagaccagggcacacttcggttatcccttgctctctttgttgaaccctttacttggtctttttattggccttttatgaacctttggcacctgtataacttatagactagagcaaactagttagtccaattatttgtgttgggcaattcaaccaccaaaatcaattaggaaataggtgtaagcctaattccctttcaatctccccctttttggtgattgatgccaacacaaaccaaagcaagtatgaaatacataatttgaactagttgcaagattgtaagtgcaaaggttacttagaattgagccaatagaaatacttataggatacgcatggattgtttcttcatttttaacattttggaccatgcttgcaccacatgttttgtttttgcaaattcgttttgtaaatccttttcaaagtcttttgcaaatagtcaaaggtaaatgaataagattttgcgaagcattttcaagatttgaaattttctccccctgtttcaaatgcttttcctttgactaaacaaaactcccctcaataaattctcctcttagtgttcaagagggttttaagatatcaattttgaaaaatactatactactttctcccccttttgaacacaataagataccaattttaaaaactcttttgaaaatagggtggtggtgcggtccttttgctttgggctaatactttctccccctttggcatgaatcgccaaaaacggatatgagtgaaatgtaagcccttttctcaaactactttctcccctttggcaaataaaacatatgagtgaagattataccaaagatggagagttgctcagagcgacgtcgaaggatgagtcatggagtggaagcctttgtcttcgccgaagactccaattccctttctatacacctatgacttgtttttggaattcacttgaaaaacacattagtcatagcatatagaagagacatgatcaaaggtatacttatgagctatgtgtgcaaaatatcaaaagaagttcctagaatcaagaatatttagctcatgcctaagtttgttaaaagtttgttcatcaagtggcttggtaaagatatcggctaattgttctttagtgttaatataagcaatctcgatatctcccttttgttggtgatcccttagaaagtgataccgaatgactatgtgtttagtgcggctatgctcgatgggattatccgccatgcggattgcactctcattatcacatagaagaggaactttggttaatttgtaaccatagtccctaagggtttgcctcatccaaagtagttgcgcgcaacaatggcctacgacaatgaactcggcttcagcggtagaaagagctacggaattttgcttctttgaagcctaagacaccaagcatcttcccaagaactggcaagtccccaatgtgctttttctattaattttacaccccgcccaatcggcatccgaataaccaattaaatcaaaagtggatcccctaggataccaaagcccaaacttaggagtataaactaaatatctcaagattcgttttacggccgtaaggtgagcttccttagggtcggcttggaatcttgcacacatgcatacagaaagcattatatccggtcgagatgcgcataaatatagcaaagagcctatcatcgaccggtataccttttgatcgacggatttacctcccgcgtcgaggtcgagatgcccattggttcccatgggtgtcttgatgggtttggcatccttcatcccaaacttggttagaatgtcttgaatatactttgtttggctaatgaaggtgccctcttggagttgcttcacttgaaatcccaagaagtacttcaactcccccatcatagacatctcgaatttttgtgtcatgatcctactaaactcttcacaagtagattcgttagtagacccaaatataatatcatcaacataaatttggcatacaaacaaatcattttcaagtgttttggtaaagagtgtaggatcggcctttccgactttgaagccattagcgataataaaatctctaaggcattcataccatgctcttggggcttgcttgagcccataaagcgccttagagagcttataaacatggttagggtactcactatcttcaaagccgggaggttgctcaacatagacctcttccttgattggtccattgaggaaggcacttttcacgtccatttgataaagcttaaagtcatggtaagtagcataggctaataatattcgaattgactcaagcctagctacgggtgcataggtttcaccgaaatccaaaccttcgacttgtgaatatcccttggccacaagtcgggctttgttccttgtcaccacaccatgctcatcttgcttgttgcggaacacccacttggttcctacaacattttgattaggacgtggaactaaatgccatacctcattcctagtgaagttattgagctcctcttgcatcgccaccacccaatccgaatcttgaagtgcttcctctaccctgtgtggctcaatagaggaaacaaaagagtaatgctcacaaaaatgtgcaacacgagatctagtggttacccccttatgaatatcgccgaggatggtgtcgatggggtgatctcgttggattgcttggtggactcttgggtgtggcggccttggatcttcatcctcattgtcttgatcatttgcatctcccccttgatcattgccgtcatcttgaggtggctcatctctttgatcttctccttcatcaatttgagcctcatcctcattttgagttggtggagatgcttgcatggaggaggatggttgatcttgtgcatttggaggctcttcggattccttaggacacacatccccaatggacatgttccttagcgcgatgcacggagcctcttcattacctatctcatcaagatcaacttgctctacttgagagccattagtctcatcaaacacaacgtcacaagaaacttcaacttgtccagtggacttgttaaagactctatatgcccttgtgtttgaatcatatcctagtaaaaaaccttctacagtcttaggagcaaatttagattttctacctcttttaacaagtataaagcatttgctaccaaagactctaaaatatgaaatgttaggctttttaccggttaggagttcatacgatgtcttcttgaggattcggtgtagatataaccggttgatggcgtagcaggcggtgttgaccgcctcggcccaaaaccgatccgaggtcttgtactcatcaagcatggttcttgccatgtccaatagagttctattcttcctctccactacaccattttgttgtggcgtgtagggagaagagaactcatgcttgatgccctccttctcagagttcttgaactccgtcccgttgtcgcttctaattttcttgatccttaagccgaactcgttttgagcccgtctcaagaatccttttaaggtctcttgggtatgagatttttcctgcaaaaagaacatccaagtgaagcgagaataatcatccacaataactagacagtacttactcccgccgatgcttatgtaagcaatcgggtcgaataggtccatgtgtaggagctctagtggcctgtcagttgtcatgatgttcttatgcggatgatgagtcccaacttgcttttctgcttggcatgcgctacaaatcctgtctttctcaaaatgaacatttgttaatcctaaaatgtgctctccctttagaagcttatgaagattcttcatcccaacatgggctagtcggtggtgccagagccaacccatgttagacttagcaattaagcaagtgtcgagttcagctctatcaaagtctaccaagtatagctgaccctctaaacactcccttaaatgctactgaatcatcacttcttctaaagacaatgacacctacatcagtaaatagacagttgtagcccattttgcataattgagaaacgaaaagcaaattgtaatctaaagaatctacaagaaaaacattggaaatagaatggtcagaagatatagcaattttacccaatcctttgaccaaaccttgatttccatccccaaatgtgatagctcgttggggatcttggtttttcttgtaggaggagaacatcttcttctcccctgtcatgtggtttgtgcacccgctatcgatgatccaacttgagcccccggatgcataaacctacaaaacaaatttagttcttgactttaggtacccaaatggttttgggtcctttgacattagatacaagaactttgggtacccaaacacaagtctttgaccccttgtgcttgcccccaacatatttggcaactactttgccggatttgttagttaaaacatatgatgcatcaaaagttttaaatgacatgtcagaatcatttgatgcactaggagttttcttcttaggcaacttagcacgggttggttgcctagagctagatgtctcacccttatacataaaagcatgattagggccagagtgagacttcctagagtgaattctcctaattttgtcctcgggataaccggtagggtacaaaatgtaaccctcgttatcctgaggcatgggagccttgcccttaacaaagttagacaatttcttaggaggggcattaattttgacattgcctccctgttggaaaccaatgccacccttaatgccagggcgtctcccactacagagcatgcttctagcaaatttaaaattttcattttctaagtcatgctcactaatcttagcattaagttgagctatgtgatcattttgtttcttaattaaagctaggtggtcaatggatagcatcaacattaatgtctctacagctagtacaaatggaagtgtttcaacggtagatgtagagggtttgcaagattttaattctacaaccttagcatgcaatatatcatttttacttctaaggtcggaaatggaagcattgcaaacatctaattctttagccttagcaagcaatttttcattttcattcctaaggctagcaagagaaatgttcaattcttctatcttagcaagcaactcaacattatcatttggaattgaaacattacaaacatttgaatcaaccttagttaacaaattagcattctcatttctaaggttgtcaatagtctcatggcaagtgcttagctcactagaaagtttttcacatttttctacttctagagcgtaagcatttttgaccttaacatgcttcttattttctttaataaggaagtcctcttgggtgtccaagagatcatccttctcatgaatagcactaattaattcatttaatttttccttttgttgcatgtttaggttggcaaaaagaatgcgtaagttatcctcctcatggctagcattatcctcatcactagaggtttcatatttagtggaggatcttgattttaccttctttcttttgtcgtcctttgccatgaggcacttgtggccgacgttggggaagagaagtcccttggtgacggcgatgtttgcggcgtcctcgttggaggaggagtcggtggagctctcgtcggagtcccactcccggcaaacatgggcatcgctgtccttcttcttgtagtatctcttcttctcctttcttctccccttcttgtcgtcgcccctgtcactgtcactagatagtggacattttgcaataaaatgaccgggcttaccacatttgtagcatactttcttggagcggggcttgtaatctttccccctcctttgcttgaggatttggcggaagctcttgatgacgagcgccatttcctcgttgtcgagcttggaggcgtcgatgggtgttctactcggtgtagactcctccttcttctcctctgtcgccttgaatgcgacaggttgtacttcggacgtggagggaccatcaagctcgttgatcttctttgagcctttgatcatcaattcaaagctcacaaaatgacctataacctcctcgggggacattagtgtatatctaggatttcctcgaattaattgaacttgtgtagggttaagaaaaacgagggatcttagaataaccttaaccatctcatggtcatcccatttcttactcccgaggttgcgcacttggttcaccaaggttttgagccggttgtacatgtcttgtggctcctccccttggcgaagtcggaagcgaccgagctccccctcgatcgtttcccgcttggtgattttggtcacctcgtctccttcgtgcgcgatctttagcgtgtcccaaatctccttagcatttttcaacccttgcaccttattatactcctctcgacttagagaggcgaggagtatagttgaggcttgggagttgaagtgttggatttgggccacttcgtcctcatcataatcttcatcccctacggatgttacctgtgcaccaaactcaacaacatcccatatacttttgtggagtgaggttagatgaaatcgcatcaaatcactccacctagcataatcttcaccatcaaatgttggtggtttgcctaatgggacggaaagtaaaggtgtatgttttggaatgcgaggatagcgtaaggggatcttactaaacttcttgcgctcatggcgcttagaagtaatggatggcgcgtcggagccggaggtggaaggtgctgaagtatcggtctcgtagtagaccacctttctcatcttctttttcttgtcgccactctgatgcgacttgtgggaagaggatttcttctccttcccctttcccttgtttcgggactcttccgatgaagccttcccgtggcttgtagtgggcttgtcgccggtctccatctccttcttggcgtgatctcccgacatcacttcgagcggttaggctctaatgaagcaccggcctctgataccaattgaaagtcgcctagagggggggggggtgaatagggtgaatctgaaatttacaaacttaattacaactacaagtcgggttagcgttagaaatataatcgagtccgagagagagggtgcaaaacaaatcgcaagcgaataaagagtgtgacacgcggatttgttttaccgaggttcggttctcccaaacctactccccgttgaggtggtcacaaagaccgggtctctttcaaccctttccctctctcaaacggtccctcggaccgagtgagcttcttcttctcaatcaaacgggaacaaaacttccccgcaaggaccaccacaaaattggtgtttcttgcctcggttacaattgagttgttcacaagaaagaacgaaagaaagaagcaatccaagcgcaagagctcgaaagaacacaagcaaatctctctcactaatcactaaagctttgtgtggagttgggagaggatttgatcacttgggtgtgtctagaattgaatgctagagctcttgtatgtagttggaagatggaaaacttggatgacttgaatgtgggggtggttggggtatttatagccccaaccaccggacactgtctggtgcgctagccacgtcacctggccgttgggtttcgaccgttggagctctgacttgtgggcccgccaggctgtccggtggcgcaccggacaagtcctgtagactgtccagtgtgccacccgcgggtgctctatcctctgcgcgcgcaggcgcgcatttaatacgttgcagtcgaccgttgcgcgcgaagtagccgttgctccgctggctcaccggacagtccggtgtgcaccggacatgtccggtgaattatagcggagcggattcccgaagctagcgagttcagagttgctctttcttggaacaccggacactgtccggtggtgcaccggacagtccggtgaattatagcggagcgcctctggaatttctcgaaggtgatgagttcagcgtgaagtcccctggtgcaccggacactgtccgttggtgcaccggacagtccggtgcgccagaccagggcacacttcggttatcccttgctctctttgttgaaccctttacttggtctttttattgaccttttgtgaacctttggcacctgtataacttataaactagagcaaactagttagtccaattatttgtgttggacaattcaaccaccaaaatcaattaggaaataggtgtaagcctaattccctttcacataccctggctaattattctatctaattatttgctggctaattgttagccaccgacaaacaattagccaagatgatccaaacagatcctaagcttagtctgatttctttagtagggctatctccggcatcactcttatctcattctttatctcaccttatattttaaactttatactatacaaatattgttatttacatcgtaaaacagtatttacctaccagataacttattttcagcttctttacaaatttaagcagaagttctgccaaatagatagcttctgctacaacttattagttcagctgcttcttaaaatgaactaaaaacagccaacaaacagaagctgctttttaccagcttatcagataagctactttttttaaccagcagcagctggccaaaagctcagagaagtaagccgcatgttatttcccgtatgcacgtgtgatgcgatgtttatttgctgttgtgtgatccacatccggaatggatggaagggacgttgtgatgtttgatgaagtgtggagacaataaggccaaaagttaatacaaatcaaatcaatgttatcggtgtagacgatagtggggggttacacgataacaaaatatgcatttagggtatgtttggatcttgtgacagctaattttagcatattaacctctaaataggccaactaacaaattaactaattgttagctagagggcgggcaaactggtttgatattagcggtttgatcttactaataagtgctaataaatcatataaagagaaaaaatatatctattagctaagtctccaaacataaactagctaatttttactaccgactaatcattagccacggacaaacaataagccacaagaacatggccttagaatctttcccggaaaagaaaaaaaatactgttcgatccaaaactccagcggcgagtttgttccatctcgtgtttcgttccgccggctgcagcgtgccgtgcatcctgcttattaagcgtcgtacgtaatgcagtgaacgtgacatcgtccgggtatggttgcgttatgcccgtctgaatcgtggcgccagctgctcttatctggattttttgctggggaaggttgcagtgtacgctacttctttcctctagatctgccttgttttccggcgtacgtggtgtagaaagcaactctacccgagcaactccaaagagtctatctataatataattttttttggttaaagaaatacgctccaacaatttttaattacatctttaaatataggtatttctattttaatttatcgccagctagaaataaaagtaaggatggatttcaagagcgtgtataagatataataaactattgaagagtagaaaaaatatagaacgtggtttatatttaattgatctctaaatgataatttagaaagtggttttaaaaaaaggctctcaaagagtgtttttgctgtacagcgcaaccgtacatgtgcaaagcttatttataccattctagacctctagatcggttttctatgtacaagatacgatcaagagattacatgatacaactctaaccctataaattataaatatagttaaaagacaaatatgggtgtcactggttgcttgcacggaccatcgttcaagcccaactcagccacctacccttctctttggttgtttgtacctcccattgaaccggactaatctgatgcaaatagccaggccagaccgagcagaatgaaccattttggtcgcaggctagacaccaaaaccgagacctggttttattcatccaattaagaaactaatttcacttttgtgttcttgttatttttatttttatgaataaaactaaatctcacttgctatatgtcgtggttttttgaaccgggagacaataagatttatgttcggcaggggtgctagcgtggactccctccgaatggtgagctacggggggctcgaaggtgaatctgagacaagggattatactggttcaggccagagtcctagtccagtgtagtgcttgacagtagtattgcttggggcgtgttacaattgggtgcttgtgtgaagctgagggatgtcttggatgatggtggttgtcttgcccttttatagctcaagggtatacgttataatgagaacttgtattctattagggtgaagtttggcctcctgcttctgggcctcgtagcccctatgttgttgtctgctgggtcatgcttctatgcctcgtagcctctatggtgtggtctgctgggtcgtgtgtcgccgtatccctgatatggcattatgtctcgtccattcgccaatgggttcctatacctattccaatacagacgtagcggtgcttggtgggtcctgctgagtcacctcgaggtgaggtttagggatgtcttaagtaaagctttatcttccgtcatccctttagcataacctttcatcatgcgtaggcgtatgcctggtacggtgtattgcctcgtcccttctggcgtatggatcactgtagagaccccgatgttgaggtatctaaagctggggttgtccggtcccactggttagcagggatacgtatctagcgtcgtgcttgatagagacccttcggtaccgcttccatggtctggacatggcttggtgatgatctgtcccatcgtgttgtcatggcttgataaaattatgtcgactcttccctctagtagaggtgttcgcctgagcgtcgtttgtcgtcttgtcgggtcgctcggcagccaggttgatcggcagccccgtctcgccggggcgctcggttggtgaaagggaaatgtggccttgagccatttctataagtgttttggtgattagatgcccaacacgtattgtttgagttcttatgtgctaaatgtgtgagaagtgcaaatcaaagaacaaggtatgtttctagacttagtaaattggttttgaatactaacatgtttatgtaagtactagaaacagtgccaagaaaagaagaaaggagatggagaagagttggctatgtacagccaaaactagctcgagcctggcacaccggactgtccggtggtgcaccggacaatgtccggtgccccaggctgctcgacggtgaactggctgctctcaagaattggccgggcgacatggctaaaattcaccggactgtccggaggtgcaccggactgtctggtgagagttcagcgctagcgcccaagcacatcggcgacgaactcgtcgctctcgggaaacgaagaaagcgtcgcggaaaaaaatcactggaccgtccggtgtagagatggcaacggggctatccccgtcggggatcgtcggaacgtttgcatccccatttaaaatatatcccccgttccccgcccccgtccccgctcgcggggatagtttttccccgtccccgtccccgaacggggatatctcccccgacgggtatcccgtccctgacaaatccccgagatgaatatcattccaacatcatgactaatatattttagatgcaaaatgagcaaagatatagtacttgttctcctcatacaatcataccagtaacgattcaacaatcaacataggcatcaagtttaaggtgtcaagcaagcatgtaacatcatcatcacacatcagtcactaccgattacacaaaaggttactggttacataaatagctaatgctgaattgggtgagcacattgcaaatgcatgccttcttgacagttgatttcatgaacttgcacttctccccaggtagttcgactgtacttaaagtgaaagttcctgcaagaatatatatggaaacacagaatagttataatgtggtaaaatactagacacatgaattgattgttcttattttatatgaaccacctgtagcccttcctgcacctcttggagaacagaccagaaggtagcaggttgcccttcatcattcaccatccctacacacacaaacacacatatatgcaagtgtcattttcagctaggcttatgaagtaggaatgatgaattacaagagaaaaggctccaaattgaagagaaagaatatgagctacataagagatatacctttgtatttgtttctgatccaatcttgtgagcacattaaagcctccaacatttgagaagtcaacctactacgatgctcacttaggactcgaccgctggtgctaaatgcagattctgaagcaactgtggttattggaatggcaaatatatcccttgctatcctcctcaaagtagggtaccttgttcctgcaaccttccaccaatctaaaatatcaaatccagttgtatgtatgtccaccatctcatcatccaagtagcgatcgagttcagatttattcctaaaggatgctggtttagtgcttgcaagacgggcactaaaggaagacaagaaccctgaattgcctactgaaggtgctgctgactttgcactactaccacatctaccttcatcttcttccaaattgtattgaagcatcaaatcagccaatgagtttttaaccttttcaacctcatactcacaatttattccaggtgtaccaagtaacacctcaaagcactgaagcaacattatttgtttgaaacgcggatcaagcatagtagcaatccccatcaacccttgaatattagtccaatatttcttaaactttgcttccatgttaactgacattgcctctatcaatggattgccacaagatgaccactttgtaatgttacttctaatatcacaaatcttgtagaagaacatattagcagtcacataattagttcaagagaacagatcagatatgtcattgaacattttaagccttcctataacctcagtagcaaattcccattcttcctcagtgggacagcaggaatattgcttatctacacgagttgctctcatgaaaacagccctatatggatatgcagtactaagcattttgtaggtggagttccatcttgtcttgcagtccaagcttaacttcttatcaatggtaacattaacatacttagctatctcctcaaacttctctactctttttggagtggctgtccaataagctacgctatcacgaatattttcaatggcgtctttcagtgactcataaagtacatcaccaataacatcatgagtgtgagggcttggcacatatataaacctacaaatcacacaagaattttgtataacatgttcacacaagaatttcagacccacaaatcacaattattacctcatgataatgtttcttagtgtccaagattcatcaacaaagtgtgcagtgatagccatgtaacctctcttttggttattagaggtccacatatcactagtgatagcaacccgggatttaattccggtcatgtattgaatggctttcttcttctctaaatcatattgctcaacaatgtgcttcctgaaataaaaagggaatagctttaggaataaataacacatgcacacaacataacaaaaacatgttacaaccatgatattatgtaccttagtgtgtttctagtcccaatcttgaacaacggttgaagggcatgcacaaacctttgaaatccagcatgatcgaccatgcttaagggatactcatggagaattatcatggcagcaagttcctttctagctatgtcctgatcaaatgtgtagttttccactgaaactgtccctgcatctgtggcactaaacctcaaagaagtttgtgacaatgtcttgttcccagccaactttatcttcctaagtgtgcaagacttcaagtgatcatgcaaatgcttagtcccagcccgtgtttcgcctccaagcttggtgaagcaatagttgcattttgcctttatttttccattccatctcactctcttgaactccttccaaacgactgatgtgagcttcctctttgaacctacctcaacaccatcttcttctacacactcctcatcttctatttcaattgcttctgattcattaatagattcatgacgtgattcagcttcaggctatgaactaattggagcttggctactgccaccactctcaattgacatctgaaacctataaatcagtatagatttgctcaatataaatcagcaaatagaaacatttatataaatcaacagatagaaatttcagatacattgtaggcagtaatatctatagttctataccaaataaatatgcagaaaaaacatttgtcatatttatatatgaccctagttgcagattgcgtacttacttgcgtccaggtgtctcagttgcagatttcttcaagcagcgcctcttcgaatccgaagtgttctttgatggtggtcggggaagtagcttcggatcaccaggagtaaatggtttggtctgtttggtgaacgatgacggaggagctttcttgttctcaggcggacgcggtggccgatcagtggcacggtcgtcccttgaggtgggacggacgggggcatcagtagaaggcagaggctgcaaggttaataagaagataggaggaggaagaaggtcttcaccggggggcgtctctgtcttcaacgccggcaactagggatccaggcattgtcgccatggtggtcggtgaagctgttttgcggcggcggccaggagcctgggctctctcgaccagcaggaagcaaactagggttatttgtttattttatatggcacattctcgtacggacagcaggaagcaagtgtggtgtgtgcggtgtgccttttgggctgctaacgaacaacaggaagcaaacttgggtttgggctgcttgcgagttgtaacaagcaattgattagattgggctgcagccattagactggtgaatcccatcggggagcagggacggggacaagtggaacgttccatccctggttcacccgttggggatgatttttagtccacgagaatccccgcggggagctatatcatcccgttatcatcccctaatagatgaaatccccaccggggatcggggatcggggccccgttgccatccctagtccggtggtgcaccggactgtccggtgagttagagccgcccgagccaacggtcaccagcgcaatcagcgggcgacgtgtggcccgcgccaacggtcgattgggcacactggactgtccggtgtgcaccggatagtgtccggtgcgccaaccggtcccaaggcccaacggtcggtagcgcccgatatggaaagagatcgtgcaccggactgctacagttgttgtccggtggtgcaccggattgtccggtgcaccactcgacagaaggcaggaattgccttccaagttggtctccaacggctcctagctgccttggggctataaaagggaccccctaggcgcatggagcaaaatacggagccttctctaagcattctaagacttccagactccgcctccacgcattttctgcctccacgcatttgattgattgtgttagtgatttgagctctgtttgagttgcaaactctctgtgctgtgtttcgagctcaagttttggcttgtgtgcgtgggtgtgctgtgaatttgggtcttgcgtgtgttgctctcctatccttactcttgtgctttctttgtgatctatattgtaagggcgagaggctccaacttgtggagattcctcgcaaacgggaagaatcctcaaaagagaaaagaccgtggtattcaagttgatcattggatcacttgaaaggggttgagtgcaaccctcgtccaattgggacgccacaacgtggaagtaggcaagtgttacttggccgaaccacgggataaaaatcgtgtgtctcttgtgttgctcttctgtgattgttttgttcgcaagagatcgcttcatagcaacttgattaactcgcactaacttttatataatcaagtctgtggctatttagcgtttgattttacaggatcacctattcacccccctctaggtgctctcagtaggcaggttgatcgacaaccccgcctcactgggttgctcaacaatatttgttcggcgagcagattggtcaacaatcccacctcgtcgggtcgctcggcggcgggttggtcgacagtctcgccccgtcgagttgcttggcaggtgggccgatcggttagtgggtcgtccttaggatgccttttgggccttctttgggtacctggttcttaggtacccaacactatatgtaatactttttatttttttggatcatttctcactcagccaaccaatcaaaatctattctagacctggcagaattagttttgattttcaaaggatggacgataagtttaaggacatactacttctaagtgtcttttggagttacgagacactcagaatagtttaggattttatattccctttggtcatactataaaccgggtataaactagtagtttgattcaggtgagtttaatggtttaggtctggtgcgaacttatcaaacttagcactaggtagctatgagaaggcacaagaatcaattggaatctcccccattcacaaatattttgaattgaaagtgaaaatagggtgaagtgattaggtccatgaggacagggattgtcggaccattgagctaggttcggtgtgcccacatgtcactactagagcacaggagaggttttgagagcacctagagggggggtgaataggtgatcctgttaaaatcaacactagatagtccaaacttgttttatcaaatgttagtaaggttaaaaccaagatgctatagagagaactcttcacttgattgttcctttagaatgagtaataaacttaggaacaatagcacaagtgattaagtgagaactctagaagagaaatcaatcacaataaaaagtgacacaagagacatggtgattttatcccgtggttcgaccaatgcatactccacgttgtggtgacctccttcagtcaaggattgcactcaatccctctcaagtgatccaataatcaaccttgagtaccacggttttcttccttagtagatggttcccgtttgtgagaaatctccacaagttggagccactcacccttacaagatcgatctcaatgaaaaccacaagagtaagggagggaaagaaacacacgcacatgctagaatcgcagcaacaatacgcacacaagttaagaagagagcacacaagaacaatgcaacaagttcacaacacatctagtgctcaaatctcagtcacgatgatccgaatgcgtatttgtggagtctaggcgtcttaggatgttcaatggaggcttggtgtattgctccatgcgcctaggggtcccttttattgccctagggcagctaggagccgttggatctccatttggtaggcaattcttgccttctgtcggttggcgcaccggacagtctggtgcaccaccggacatgaaaagtgcccgatttctttcctcttctagcgaagccgaccgttgagcctttggtccccttggcgcaccggacactttccggtgcacaccggacagtccggtgcggcctggtgatcgttggctcggcccacgtgtcgcccgttgatcgcgcagccgaccgttggcgcgggcattgatggctcaccggatagtccggtgcaccaccggacagtccagtgaattttagccgcggcgccctcggttttttccgagagcgacgagttcgtcgtcgggccagcctgggcaccgaacactgtccggtgcacaccggacggtccggtgtacctcaggctggtgcaagtttggttggacttagccaaacttcttcattccaatttcatttgatttgacgagcatcctagcacttagagaaatgtgttagtaccaaaaacaattcaataaggccagattcataccttgattctttgatttgcatttttcaaccacttagtacatattaaacaaaatatgtgttgggcatctaatcaccaaaacaattatagaaatggtccaagggcacatttccctttcaggtttgaggttgttggaccctgaccattgggtccatcttaccaaacgctatagtcagtgcaattagggtttgctctaaggagcatcgaacgctagtatagagtggtgcatcataccgatggttataatgtttgaagacttccaaagagggttcaagcacaccaaaccggcccaacaggaccattggaccatgtgctttaggtaggttgtagctgctagttatagctgatgtctgatatagtgatcttattgtgatcattgagtctcatcaagctatagaggtggtatgagtcataggcctcagatggtctagtgaacccattttactgcaaagggattgtaatgcctagttgggtagtatttattatactgctactcttccatgaaacctcttgttggggacttgtccttaaatgctatgaattaagaacaaggcaacacagaaattgttaaacgttaaagtccttcgtccttcgaagcattacttctcttgggatataatgagtctcggacgaaggttatgaaagacataccttcataagtacaacaaataaacaagaaggattcatataaggtatgggaaataacataagcacttgaatattattattacctcatttctatcttatctttattgaaaaatagaaatgataacaaattacaaatgtaccttcggcttgaaagaaggcaaaagtacaagagtgacgcaaaagcaaatgccaagtcagcgtgaacagtacgggaacactgttcatctatttataggcacgggacgcagcccatgtaaaattacacctatgccctttacatttgctaataactctatagtattccatcaaggtctaaatggccttttcctctttaagtcggtttccttttcccttatcatgccgaagctcctctgcgcatagcttcggctatgtgccatccttcgtattctttatgcttcttcacactgtggttttgacataagtccgaaggtacctgtttatgtatcatactccagaaacattgttaaatcatgtttttgaggaccttcggaagctgaaggcccccaacagtagccccacgcaatattaatttgttagaatgataaattcaaattgcgatatggacgaaggccttaagccgaaggtccgaaaaaacaccttccctttgctagaatagcaatcagtcaatgacaagcggggccctcccacttgcaacacgctaggcctataaataagagcacaccacaagcacaattggcacgccttcttgccatctgctcttgctttcccaatttttagctcttgcgcaccaacacttgcttggttcttaaattttctaagcttcggccttgagagcagttttttagcatttccgaagatgtctgaagataaacaagctgttgctgcaacgaagctgagcctttctgaggagaagaatcttggctttcttgagtcaatagcaaagacgaatacggagaagattactagggagattttagaaggtttatctgaagaaactggtgataatgacagttatgatatagaaagcggcggagaagactccgaagatcgaccttggcgaccaagtcatgcagtttttggaaaatcaactattaaacagagccatcttgacaatatgagggggagatattttcaggatatgtctattgtgagagctaacatcggagataagacttgtcctactcccgaagaaaatgaagtcgtgatcttccgaagcttcttcaaggctgggcttcggttccctctaagcagtttcgtggttgaggttttgaagatattccagatttttcttcaccagattacccccgaagccattataagaatgggagtcttcgtctgggctgcgaggagccaaggcttggagccaaatgcaaaaagcttctgcagcatgcacgaactgttatatgagacgaaaccctgggcaaagagcaatatcataacaattttggctgctatagcttcgtcgctcgctctggctcgagctgccccgtgccaaccttccggaaaagatggcctagggactggacgaaggaatggttttacgtgaaaaatgatttaaaggcacaagaagatattaaagatattatcatgcgtcctatttggcagtgattcggccttcggaaaccgaaggtggaaattgatgaagcagccgaagagtgccaaaaggccttcgacatagtctgctctttcatcgggacgagggatttagtccaggagcacatagccttcagagtgtggccgcttgtagaacaatgggaaatgccgaaggagactatcagcaagtctgacgaaggtgagctggttaggttgaaatacacattcagatatgaaggtaagtttattgagccagatgatgattggctgaaatgcatcgaagcaacaagcgacgaactgcttggaccatattcaaaggcagaagataacacgttatctgcggccttcggagtccggaagaagaagaggctgaatagagttttcgatgctattgggtttatgtaccctgattaccgctacccgctgaaagggcaaaagagaaaaagtgcaacttctgggaaaggtgatgcttcagttgttctaagtgagcccgcgccaaagaagaaaaaggtgaaggtccttactcaccgatcgcgcttcattgaaccggccacagtgcccgaatttggtggcgagacccctatggctactaaagccaaaggacctgctcctacacagaagaatgaagagccagctgcatcgccgaaagcaccgctggccaaattgagtgagccgaaggtcgataatgttaaagaggcagaggtcgagagaaaaaagatatcagaagttacaagtccttcggcagaagtgacagtgccgaaggcacaaaaagatcttatagttaccctgttggggacttgttctcaaatgctatgaattaagaacaaggcaacataaaatgttaaatatcaatgcccttcgtccgccgaaacattatatccacaaggatttaatgaacttcggacgaaggtcgcgagcatagtattacgaaggtttcaccttcataattaaacttataaagataatataaagtgaagtaaaacatgaaacattaaaggtaaatttattgaaaataaatgatttcattcacatatcttattatatgaatttaagatctttgaatacaacatttaagtacatttatacctttgccttgacaaacaataattcccgagtgatgcgttagcaattacaggaatccgtgaacagtaagggaatactattcactatttataggcacgggacacagctcatgaggaattacaattatgcccctcataaaagtttacaacaatgactcagacccttacgggttaaaaagtcattctatctttaagtcggttcgacccttcagcttcggatatgctgtagttccgaagctttgtaaacggtgtcttcgtcatcatgttcaagcagcttcagccgaagctgtttctttccgaaggaccttcggcgacgaagcatggtcccaacagtagccccttcgcggtgctagatcgtttttcgtaacgagcttgatccgtgaaaaaagtctcttaggcttcagaaagccgaaggtccgaaaaacaccttccctgatctcgttgttgagaaacgatagagtttccgagcgcaaagcggtcccaccatgcaggttcactattttggtttttgcggcccaccgttcagcgggtgcgagcaactgtttgcctggtgtaaaaatcctgacgattcaccttcttacctgcagcactatataaacagacgggtaggtgtgaagttaccacagcattcattgctattgcactgttttgctgccaaaatttttaaccatagccgaagcttgactttcgcattcaaacgaagctccagtttggtgtttgcttcgtcagaagaagagcttcggaagaaaaaggttattaatttccaagaaatttttcaagaaattcaaaattaaatggccagagtgcgctctactgctagagttgaacgcgagggagacgaagccgaaggtgcggaaactgttcctatctctgaagcaatgaagcgatctggattgatgacatcagaagacatccctgctgctgaagtagaacaagcagatattgagggggctgattctgacggtgattacaatatcgcagtaccgagcaagcctagccatctggacttcggaaagtcgaccatctcgaaggctgatttcccaaagatggtgaagtcgggctactttagcgaagatgagaaaaagctgattcgctttggtggagaggaaattacccgaagcctcagaaagatgaaatagtgattttcaagagtttcctcaaagctggtttgagatttcctttgaataggatgattgctgatgtgctaaaaaagttcgggatctattttcatcaactaactcataacgctattgttaggcttagtgtttatatttgggctcttcgaagccagggggtggagccatttgccgaaggtttctaccgagtacacgagttacactaccaaaccaaggccagaaaggatggacttcatgaaaattttggttgttacaatttcgcctatcggaaaactacaaaatttcctgtgatcagctaccgaagcaagtggtcggcaggctggaaatcggaatggttctacatcaaagttgatgacgacaaggagaagcttgtacagagtccgcttgaactaatcttcggagaaacccgaccccagtgcaatatgacaccagaaggtccaacccaaacagcgttggctgaattcagaattattgcagagcacattggcaccagggatttggtgcaggaatttctggctttcaaagtatttccaactatgaaggaatggactatgccaaagcttaaaggagagaagaaagagggggagctggtctgactatcctatcattataaattcaagaaatattttaaggcaccctgccaagaatggctcgaaacaatcgaaataatgagcactgaaattcttggaaattactctaaaaaagaagaccaattaatgacagtagccttcggcacccggccgaaatgaaggctaaacagagtacttgatgctatcggcttcgaatatcctgattatggtcgattgggcagagatgctggaggcccgaaaagaaaaagaattgccagcgccgttgacgaagaaagcaccaaagtggccaaaaagaaaaaggaaacttctgaaaagctgagccctgagccgaaggtggctgctgcaagaaaaaggaaaactgcatctctagaaccgaaagcattggttcaagaagaagaaactcctgcgacaccttctgctaccgaagtagaagggattctgaaggtaatgactgaacccttgcctgtcaagctaagtccgctggcgccggaactgacgaagttttttcagaaggacaaagaagcttcggcagcagaaagtcctgcactgccgaagaaacgaagaattattcaaatagcagatgtgattcatcagacgccgccactggcgacagtgtcaaaaattgtttctgtcgagaccgctgaagccgaaggtgccacagccgaagccaccagagtggaaaccactgaagctgaaatcggcgaagccgaagctaccggggccgaagccgagaccacggaaggttcaaatctggaaaccactcttgaagttattgacaatatactcctgaaaatggctgaagaagaagctgttgtggctgcggtaaacacgacaactgaaaagggaaaggagcagatcgacaacattttagaagaagaaaattttaactttcaagatttgcttggacaagagctaacaggcgtggaaaaagaagagctgaaaaaatatgccatatcttgcgggtataagccaggggctacgctatttggtggggtcaacgaagggaagttaagatgccttcggaaccgcaccgaggccaaagttgttagaaccctctccaaaggcgttggcctgccgaaactagaagcggacctctgcaggtatcaacgacaccatattgctggaagcctgctctatgctaattttaaggtaacaaattttattatttttattatatttatttattttttaggtcgttttctgacaaagattgttttggcagagtatacttttgagtaaggttctaaaaatgcaacaagatctcgaagaggagaagaacaaaactatcatcaaagatttggaagaaaagttgaaaattacgaagctgttttgaaaaagaaggacttcaccatccaggaccttgaaatcatggctaaagaacacgaaggtgcattggaaaagaaagactttgttattcagtctatggaaggctccttggctgaggtccaagacgagaataacagtttaaagaatgaattgctcaaacaactagaaaaatctgagcaggagaagaaacaccttgaagcaagtcttaaaactgagatagaaaggaattcaaatttgcaaaaatccttgaagaagcttcaatagaaatgcctaagcttcggcagccaatgcgtgcagcggctgaaggatgtgtttcattctattggagccagctctgaaaaatttacaccttcagctgaaaacttgcccagcacattagaatatattgaaggcgaggttgatgctcttgacgaagttattggtggtcatgctgacttctgcgccctggtagcttctcggggcacagctaccgcttttctgaaggctggctgcacacatggaaaaattgtgaataggccaaacttcagcttatcatcatcagatctgatagatattctaagcctagcccgaagtatcggaaatagatttatgacccaaatttgggtaaacagcgggcggaaaatggcgggtgacgaagctcgaagtcatcttaagccggtaagaagcttatatttgttacttttaccttctccttgaaatttgtacctttcttattctgttctttaatatacataggatgacgaagctgaagtataacgaagctgaagtatgacaaagcggaagtatgacgaagctgaagtatgacgacctgaagcttgatagttgctacaatattctttcctgcaaaaattctcgagagacttttgtaatattattatggaaaaacttatgtaaatttgtacataccttgtaatatattttgtttccgctatctgtgtacaatctgctttgttgtggacgaaacttcttttttgagtcgaaggcgaaaaacaccttcccttcttttcgtacataacgaagcataaaaatttttcctttttcgaagtctttcctcattgccgaagcacctatcttttttgtgtggtatgatgattctatatatgtctaaatgaatgtttatgaatgcaaatgacatgatgaaatgtattgtggagatgaatattgggaatgattcaaatcctttcacttttcagcttcatcgtttacttttcggtgtattagcgttgacttttcactgtaagcctcccttaggagcttcttcgccttttactttcagcggaatcaacgttgactttttgctgtaagcctcccttaggagcttcttcgccttttactttcagcagaatcagcgttgacttttcgctgtaagctctgcattcccttaggaacgacttttgagcttctccctgttttcttttcttttcccttggcatttacatttacattttttgggggatatcacttttatagaattgaaataaggaaaagaagaaatacatgttgtggccccattaaaaacctttctccccctttggaaaggaaaagggtgccacaaaaaagaacagaaaaaattacatcaaattaaacataatatcgccgaagctcatccgcatttcatgacctagggatgtcgttgccgtccatatccttcaatctataggaaccgggtcttgacaaagatattaccaaaaaaggtccttcccacttcagctgtaatttgctcactgtctcagggttggctactcttcgaagcaccagatgtcctggttcaatgttcttcagcttaacctttctgtcccgccattttattgtttcggcttgatatttattgatgttttctgcagcttgaagtctgatcccttctatggcatctttttccacagagcaatcagcttcttcttcaccttctgccgaagctaccgttcttattgatcctgctttggcttcttccggggttattgcttcatccccaaacaatagtttgaaaggcgtaaagcctgttgatcttgacatggttgtgttatggctccacaccactttgattaactcatctggccactttcccctgggctgattgaagattgacttcattattcctgtcattatgatcccgttagctcgttcgacaagtccgtttgactccggatgtcgaactgatgcaaaatagatcttcatgccaatttgattacaaaattctctgaaagcttcagaatcaatctgtgttccattatccacagtaattgccttcggcactccgaagcgacaaacaatattttgccaggaaaacttttgaatagtaaccgaagttattgtggctagaggctttgcctcaatccacttagaaaaatattccactgccactacaacatatcttaagtttccctgtgctggtggtaatggacctagtaaatcaaggccccacctttgcaacggccaagtaggttgtattaattgagttaaagacgaaggttgtttttgatctcttgcacatttctgacaaccttcgcacttttggactaaatccgctgcatccgaagctgcctttggccaatagaatccttgacaaaaaactttcccgagcaaaggcctagatccaatgtgagatccacacaggcctgcgtgtatttccttcattaattctatacctttggatctggataaacacttgagcaatggggaacagaccccacgcttgtatagctccccttttattatgacatatggtcgagctcttgcttctattcttctgttataagcttcgtcgtctgaaagaaaattaccctgaaggaaagagataatttcagttctccaatcttcactatacacaggggatatattgaggatcactctttcaagaagctcgaccaaaggtgcttttattgtttcgaaaaatacttccgaaggtaaaggcagcccctgtgctgctgacttggccaatagatcagcatattcattttctccacgaggaatatttttaacagagaatccctcaaaggaagcctcaatccttcggactgtatctagatatttttcaagcttcggatctcttgctttatagctcttgtcaatatgactagaaataacttgggaatcaattttaaggatggcccttctgatccccattgcttttaacttccgaagacccaagagcagagcttcgtattcagcaatattgtttgtacaactgaaatcaagtcttgccacataacaagttttaactttggaaggtgaaaccaacacagcagctgcccctgctccgaaggttccccaagacccatcacaaaacactgcccatgcttcgacatctttattcgtttcttcctcctgagcccctggcgtccagtcagcaatgaagtctgccaacgcttgggactgaatcgaagatctatggacataatcaatacaaaattcattgagctctgtagcccattttccgatccttccagtagcttctcgatttctcataatatccttcaacgattgtgaagaaggaacaactatgttgtaagcttgaaaataatgccgaagcttcctggagaccatcaaaacagcatacagtactttctccaattctgtataatttttctttgataaactaagaacttcggatacaaaatatattggggcctgcttcttgacttggccttcaagcttctcctggacaagcgctgcacttaccgctgagtgtgaagctgccacatataataacaaaggagcccctggcgttggtggagttagtgttgttagatttatcaaatattgcttcagttcttcgaaggctctctgctggactggtccccattgaaaaacttcggctgacttcagcacttcgaaaaatggtaaatttctctctgctgatctagatacgaatctgttgagagatgccagccttcctgtcaatctttgagcccccttctttgtgcttggtggttccattcgaagtatagcttcgattttgcttggattagcctcaattccctttgttgaaactaggcaaccaagaaatttccccttcttcactccgaagacacatttttctggattcagctttaaaccagcctgtctaaaattagcgaaggtctcctgtagatcaacaatgtgattatcttgcttcgtgctttttacaatgatatcatcaacataagttagcacattcctgcctatctgggaatggagaactttcgctgtcattctgctgaagcttcctccagcattcttaagcccctcaggcatccgaaggtaacaatatgttccactaggggttatgaagctggttttcggttcatcctccttcatccagatttggtgatagcctgaatagcaatccagcagactcataagctctgatgaagctgctgcatcgactaaggaatctatccttggcaatggaaactcgtccttcggacaggccttattgagatcagtaaaatcgatacacattctccatttaccattggccttcttcaccataacggtgttagccaaccattctgggtattttacctctctgataactccggcactgaggagtctcttcacttcattccgagcaccttcggccttgtcatcggacatcttccgaagcctctgctttctaggtctgaaggatggatcgacattgagcgagtgctcaataacatccctgttaacttcgcaaagatcattagctgaccaagcaaaaacatctttattgttgaacaaaaaccatatcaaggtcttctcctgttcttcggacagttgagatcccaatagcaccttctgctctgctatgtcctcacataagagcatgggcttcggctgatcagccgaatcagctttttcccttctgaacttgtattgctcacaggcttcagctccatctatattatggattgcttttgagtctgtccaatttccttcggctcttctggcagcttcctgacttccatgaatagcaatgggcccttggtccgaaggtatcttcatgcaaagataagctggatgaagaattgcttcgaaggcattgagagtaccacgaccaatgattgcattgtaagggtattccatgtcaacaatatcaaatacaacttgttcagtccttgtgttgttgataaatccgaaggtcactggcattgtgattttgtcgagtgctacaatctgccttcctccgaagccgcaaaggggatgtgtggcatcatgaattttgtcttcgggctcttgcatatgtctgaaggccttagcaaatatgatatcagctgcactgcctgtatcaaccaaaacattatggaccagaaatcctttgatcacacacgagataaccatagcatcgttgtgttggtaatccttgagttgaagatcctcttgggagaaggtgattggtacgtgagaccatcttgacttgatgaagggtccttgcaccccgacatgttgtacccttctctgtgcctccttcttctgcttcttgttggctggctctgagcatgaaccgcctgttatcgggagtaccaacttcggggccgaagcagctccagcttgaatgttggacgaagccattagctcgaaaaagtggaagtgagttcaccggaggtgggcgccaacgttggggacttgttctcaaatgctatgaattaagaacaaggcaacataaaatgttaaatatcaatgcccttcgtccgccaaaactttatatccacaaggatttaatgaacttcggacgaaggtcgcgagcatagtattacgaaggtttcaccttcgtaattaaacttataaagataatataaagtgaagtaaaacatgaaacattaaaggtaaatttattgaaaataaatgacttcattcacatatcttattatatgaatttaagatctttgaatacaacgtttaagtacatttatacctttgccttgacaaacaatgattcccgagtgatgcgttagcaattacaggaatccgtgaacagtaagggaatactgttcactatttataggcacgggacacagctcatgaggaattacaattatgcccctcataaaagtttacaacaatgactcagacccttacgggttaaaaggtcattctatctttaagtcagttcgacccttcagcttcggatatgctttagttccgaagctttgtaaacggtgtcttcgtcatcatgttcaagcagcttcagccgaagctgtttctttccgcaggaccttcggcgacgaagcatggtcccaacataccccgaaaaggaaaaggatggtccacgtactagatgtactggaggaaataaagactacaagctctactccaagaaaaacaaccgaagtttcaaaaaacgcgaattgaaacaaaacaagctggagccgaagctgcaaaaagtcatgccgagtccgaagctggaccctcagagcccgccaggaagaagtccctggaagaggaagctccagaacagactctgtcagaaaaaactgccactcctactcccgaagcatcttccgaaattgtcgattatattgtacgacatgctttgggaaaaaggttgtctgaaaaagaaaagcgagaagctcaattttatgcccaaaaattgaaatatccaaagggggcattgatttttaatggcagcggagaagaagatttcttgtattgtctcccagacagtaaggaaatttctgtctgccgggagatgggcaaaagcttcggattcccgacgttggaagatggactttcggtgctatcgaaagatgaactggcggacagcttagcatataatagcctaaaggtaaaaaaaattgttatattaaaaaattgagatttattttatttgcttatacttaatttcatacttctttcgcagggcctcattcttagcaacgccctttgggcacaaaaaagtgccgaagatgaagggtgtagtatagccttgaacaaccttcgttccgaagtaattgaactaaggaacgaaggtcttaaaaaagataagattttaaactcattgttaaacagaataaaagaagacgaagctactgccaaagcccaagctgaagcccagagaagcgaaattgaggatctctggaaacaactggcagaggcaaaattaaaatgtgcaattgccgaagctgaccgggacgccagtaactattggaaaaattattgggagaagacagttgtagaactttggtcttcaaaagagaaatgctacgaaaaatccatagaatgtgtgcaaaaaataaaatccagcttcgctaatgttggcgcattctctagcgaggacaacttcgtaaggggcgatcctgaaggcctaattgattggatcagcaacgaagccgaagcctttgaagaaattttgagtggtctcggggatgtctgcgccttctcaggtgccaggggaatcatggctattttggagaaatcaggctgtgatcacgtgaaagctttggctcaaaccgaagctaccttatctattgaagatacaaaggacccctcggccgaagcaagcttagttggcgggaaattctttactgacatctgggagaatggcgaccgagagatggtgcacgagataataaaaaagagtgaaaaagattctcatgatgcaaaaaagcgatgaaagcagttgagaaagccgcggatcttgaaaggtggataggtattgcttaataacttttaactttatattttatttttgtgacttcagacttatttatgttttctatcgtagctgagctatctccttccctagagcccttcgggccaacggtcgacccagaagcaaagaaagaggaagaaatcactaaaatggccgaagctattttggatgaagccatctctcgactattaaacgaagctgcggaagcagttttaaaagaagaatagttgttattgtaaaaacatttggaatgtaatatttgctgaacaaagtgtgtaatatttttataatttgaatgtaatatataagctgctcgtaactcaattctttacgatgcatgaaactttacgtacataccgtttttgagccttcggcgaaaaaacaccttcccttcttttcatgcttcgtgaagaatatccatacttcgtaaaaacattatgcttcataagcaatagatctctttttcatattagagttgatgaagttgtacttgttcaaaacttattgtgccttggcactgcttcttcgaaacaatctcgaagatcaacattgtatccccttcttgtgttattgatgcaatatgatgttatgctatgcaaaatgatgtgatgatgttatgctatgcaaaatgatatttatgtcgaagatacataaacattcccacagtagagcacacaatctttttgccgtttatttttcggcttcaccgcttatttttcggtgtatcagcgctgacttttcgctgtaagcctcccttaggtgcttcttcgccttttacttcggcggtatttgcgttgactttttgcgcttcgccttatacttcggtggaatcagcgtttatttctcgctgtaagctctgcattccctttggaacgacttttgagcagaaaacttacgctgcgctcccttagaaatgactttttgtaacttcggcaaacttacgctgcgtttcatagaacgacttttttgtagtttcggagatactttctgtagccacaagttcttaagaacgagttttcatgcttcatcaactttttgaattccgtaagtctgtggagaagatatattttcactatgacaaaaacaaagctgttacaagaaattgaaaacaacaagaaaaacttaggctttcaatgattgttctttattaaaaagaaaaatgataactaatgcaagaactatttcagaagtaggatatctgttagtagatgtgctttgactctggcacaatactgttgactgtgcgagcttcggactcctctctgaagtctcgttgctgatgagtgtgctggctcccttctggctgctggcctcgttgtattggtggtggaggtggaagctgttgccaagatgcctgaggttggcttgccgaagcaacagaagctgcaggatggttacccttacccacatactctggaatgtacggtgagtggtacgaagcagtatgcataacttgcttcggctggctctgttgggctgcagtttctgctatctctttctgtttctggatggtgacatggcacatcctggtagtatggcccttgtcctcaccgcagaatagacaataaattttcctgggctgatccccaaaccttcctccgaagcccctggctcctctgccccttggggctggaggccgaggataactctgttgctgccccgaagcctaggaggaatattgcggcctctgttgctgacttcccctgtcgtcattctgagtggaatgaattgatctgacatgtctagggtgtactctccctccgaagcccctggtcatctcggagaatctgtaagaaggcccccaacacctctctttcccattcgtttaggtgagaaaacacattggggagcactagggagttctttcctagtgaggcgtctgtgatttgataatcacaagattaaggatttcattagtgcatgtgtagtagcaagtgtgcatccaccttcctcattaagcttgtttaggataagccagagtttgtgccggttactcttgatgttcaacaacaccaagatggcttggtggtaattaagagcttggtgatctctcagtggtgctcgtgagagtcccaactcattgtgtaataaaagattataggtgattcaccatgccggagtggtgaataatcaacccgtagagagcattgagtccttgaatggatcgatggggggctacacccttgtgtgggtcaagtcagagttttagcagttcttgcacccatgatctcatcgtgaagcatagataaatttaaattcttttgaattatttatatatgacaacactattcgtcgctctaggtgactatcacctaccctaaaatgacttaacaaatctttattaattgttaagtcattcacatttttgttaatccactccaaagtcagggtgtttagtgtttttacatccatgtctccttagactcacggtgtctctcccagattctctctcaccctcacctctctctcactagccactagggaacgcaacacccatcgatggctcttcgccccatgaaacgttcacacaatcgcaattgtcgaggcatgcatggctgggagagcagacatggaggcatacgtgctagggttgcacatgggcaagagggtgggtgtggctattcagatatgcatggtgagcaagatgggtgaggttgtgggcatgatgaggggataaggaagaataagatctcttttgttaggctgtctccagcagctatcgtatcccattccctatcgcatcccctattttaaactttactatgcaaacaatgtaatatatagtgcagattccctattttacacaatgtgttgtagacaaccttggagctcttgcataaaagctctagttttggctctagctcctctgagaaaacaatccccaccatgtttttaggaagaatccctgaagggcaccccatttggttggaaatacatctcctcctacaggattatgtttgacttttttttgcaatgtgggacccacaggggagaggaggacgagaaggaaccggagagcctattttttgggctcctggcttcgcttggtttctaggggcggctccttcctattttcacaaaggagctagtagaggagcctcccatttcatgattttttgaaggatctatttaaggagccttgaaagagccctaccaaggtaggcctagaaataataaaggaggaaaaagagaaggtatcacaacttttgtctacaacgtgaaaatgtttggctaaatagataaaacagtttgaattttatcgattcaattgtttattgagggcatgtttgggagggctttagttctagcttctttcgcgaaaaatccagagccctacaaaatgacgtttggtaaaacgacttcttccgaaaaacacccaaaaacccaagatattttatactacgaaggaaaggtcacacatcctagttagcttcactggttctagctccttccaattttgcaaaaaagtcacaaaggataagccattttttcaaatgatttgtgaaatgcctacgctaaaaagtctacttttccaaaaaaactagagctagagccgtttttggcaagtcagaaccctaccaaatagtccctcagtttaagcaaagtgaggctatactgaagctaaattatgccaaattgggcctacatctccatattttcaaccaaatgctttagggtttcttgtaatcgacatgatttgtttcttcataaatagtatatggaccgctccaaaatactccatccgtttcaatttatattacgtttgatctttttaccctaaatttgatcgactcgtcttattaaaaaagttcataactattaataatctttactgtgatatcatttagcatataatatactttaagtgtagctttgattttttttttgcaaaaattaaatgaaacgacccaatcaaacttgataaaaaagtaaaactaattataaatttggacataaggagtaggagggtgtttgaatacactagagttaatagttagttgtcttaaaatttgctagtacaattagctagctaacaaatatttaggtaactattagctaatttgctaaaaacagctaatagttgaactattagttgaactattagctagactgtttggatgtattcaactaattttagcagctaactattagttatagtataatattcaaacacctcctaattaaaatggacaaatatctattcccttggtcccttgcgttagattttccatatatcctcatttagtataaaaagaatcatcaaaaagtggacaacccctagtggaacaccattttagtagtggttgcatgaaacctttcgcgcatcagttactatgtgtcactctaaaaatggggcagcatgtacgcagtgcctatatttatacaaggcatctatcgttgcctcctcagttcatcactaatcacacttattgtgccctcgacgagtatctagctagctcattaatcgatcaatcggggtgtgcggtcgaaggcggcaatggcgagctactcgtcgcggcgtccatgcaatacctgtagcacgaaggcgatggccgggagcgtggtcggcgagcccgtcgtgctggggcagagggtgacggtgctgacggtggacggcggcggcgtccggggtctcatcccgggaaccatcctcgccttcctggaggccaggctgcaggagctggacggaccggaggcgaggctggcggactacttcgactacatcgccggaaccagcaccggcggtctcatcaccgccatgctcaccgcgcccggcaaggacaagcggcctctctacgctgccaaggacatcaactacttttacatggagaactgcccgcgcatcttccctcagaagtgagtccgatgctgccgccattgttctcgcatccatccagcatcgtacgtcctctatacatctgcggatgatcatttgcgcatgtttgtggcatgcatgtgagcaggagcaggcttgcggccgccatgtccgcgctgaggaagccaaagtacaacggcaagtgcatgcgcagcctgattaggagcatcctcggcgagacgagggtaagcgagacgctgaccaacgtcatcatccctgccttcgacatcaggctgctgcagcctatcatcttctctacctacgacgtacgtacgtcgtcacgaatgattcatctgtacgtcgtcgcatgcgaatggctgcctacgccgtgcgctaacatactcagctctttccgatctgctgcgccaatttgcaggccaagagcacgcctctgaagaacgcgctgctctcggacgtgtgcattggcacgtccgccgcgccgacctacctcccggcgcactacttccagactgaagacgccaacggcaaggagcgcgaatacaacctcatcgacggcggtgtggcggccaacaacccggtaactgactagctaactgcaaaacgaacgcacagactccatgtccatggcggcccacaaggtcgatgctaattgttgcttatgtatgtcgcccgattgcacatgcgtagacgatggttgcgatgacgcagatcaccaaaaagatgcttgccagcaaggacaaggccgaggagctgtacccagtgaacccgtcgaactgccgcaggttcctggtgctgtccatcgggacggggtcgacgtccgagcagggcctctacacggcgcggcagtgctcccggtggggcatctgccggtggctccgcaacaacggcatggcccccatcatcgacatcttcatggcggccagctcggacctggtggacatccacgtcgccgcgatgttccagtcgctccacagcgacggcgactacctacgcatccaggacaactcgctccgtggcgccgcggcaaccgtggacgcggcgacgccggagaacatgcggacgctcgtcgggatcggggagcggatgctggcacagcgggtgtccagggtcaacgtggagacagggagcgaggtacgaaccggtgaccggagaaggaagcaatgccgatgccctcggtgggctcgctaggcagctctccgaggagaggagaacaaggctcgcgcgccgcgtctctgccatcaaccccagaagctctagatgtgcgccctacgatatctaagacaagtggctttactgtcaatcacatgcttgtaaataagtagactttattttaataaaatataaatatatatatattctgataaccaagattcgaaccctcacttatacacaattttatcttattttttataaaatgagaatggaaaggactaccgtgaacgactatagaaccaatcatactagtttaaaatgctcgtaagctatgacgaacctagtaggccggtgctggaccattccaaaaaacctataaaaataaatttaatattaaattaaacatatggtctatatatcagatattaaactcaaaagaataattattataatttatcttagctaaaaggttgagaaaggtatgcgttaaaaaagagttttaacccatttttatagcttatttgatcgcccgtccacttttagggagcgaggtggtactatgcagaagtgttgcgctgtgtgcgacttactatcatgttgggtttaggtggattctcacgacccaatgatagacgagaagtgtgggagatgaacaaacctacgcatttcgcgtacgacacatgtgtttgaacaacgagttagattggaaaaaatataatgaccttttttgcaaaaatgactacaatgaaaaccaggaaaaccggtgcttcataggagtagagatttgacggtaaattgttacgatctactggtatttgctgcgaggatgtattcgcttggtgaaaacagaattacagagtagcagtagcagggaagacagtagcgagaggagaagaagaaacttgaggaagaagaagataaatgtagttgttacatcctgccttcgccgtaggtctcagcgagcatatatcttcaggtcctccattctgggccctggaatctcacattggccttacgctggcgtgttcctcttctcggcccaactgtagtcttctcttgaggcccaccagtctccacattcctttgttgctgctatagctcctcggacacggctgcttccgcctgctgctgcacctggatgtcttctgaagtcgacttgcgtggagggacagtgctgccattcccctcccgataacacgctgcttgtccccaagcaggcgctcgagggaacctctgacgaagtggaatcaggtcctcccaagttgccagagatggatgcaactcagaccacagaatcaaccgttgtgatgctccattaggcccccatcggcattgtagtactcgttcaggaatttggtggttgtcaaggcgatcaggaagctgtgccaccaccactaaagaacccactgccttcttgagttgtgaaacatggaacacgggatggatagtagaagtaactggaagctccagcctgtaagcaacagatcccaacttagcagcaactggaaatggcccaaaaagcgaaaatctagcttctgatttgcccgaggtgcaagcgatgactgcacataaggctgcataacagccttctcttgcagccactctccgaggataggcacaggagtggaatccaaaatgtcaatgccaaaatgcttgggtgcataaccatatagcacctcaaatggagacattttcaatgctgaatgccaactagaattgtaccaaaattctgccaagtacaaccagtcaatccatttgtgaggacaagcatgcacaaaacatctcaaaaaggtctcaaggcactgattaactctctttgtttgtccatcggattgagggtgataggaagaactcatattcagtgatacaccagccagggtaaacaatgatttccagagctgactagtaaagattttatcgcgatcagagaccatagcagatggcataccatgcaggcgataaatgtgttgcataaaggccttggccaccactgcagctgtgaaggggtgtttaaggggaatgaaatgtccaaacttggagaatttgtcaaccacgacaagaatacaatttttacctccggacacaagcaagccttcaacaaaatccatagtgatcgtttgccaagctcctgaaggcacatgaagaggttggagtaggcctgggtatttcactctctcaggtttagcttgctgacaagtggcacatgctgcaatgaactggatgacagatttcttcatgttcggccaggcaaacaactgcttcagccgatggtaagcgactgctatacccgagtgacccccaacagcagaactatggagagcagacaatatagactgttgaagtgtatgattgttaccaacccaaatacggcctttaaacttaagcaacccttcttgaagagtaaaatgaggaacaacatcttggtcaacaaccaacttagataacaaggtcttagccgaagggtccaacaaatatccatccattaccaaacgagtccactatggtgaacagactgagagagcatgtaatgtgatagcatgttgtcttctcgacaaggcgtcagcaactctattttcatgtccatgcttgtatacaatcttatattgcaaccccaaaagtttagtaaagacttttgctgccatggagtgttaagccattgctcattcaaatgcaccaaactcttttggtcagtataaataacaaactccccatgaagtaagtaagctcgccattgttccaccgcgaccaatatggctaagtactccttctcataggttgataagccttgagtcttaacaccaagaggtttgctgagaacgctaatggatgaccattctgcaaaagtacagctcccaccccattcttgcaagcatcggtctcaatagcaaaaggttggtgaaagttggataatgctaacaccggggctgagatcacagcttgcttcaaggtattgaaggagatttcttgatcttgagtccaaacatagaacacccctttctttcacagtgcatttagaggtttggcaataatagcaaaatgactgacaaatcgcctataataacccgccaaaccaaggaagctccttaactctttaacattggagggcacaggccagttcaacacagcatcaacctttgcaggatcagtatccactccagcagcactgatcacatgacccaagtaagcaatagatgtttgagcaaatttacacttagacttcttgacaaaccagtggtctttttggagaatggtgagaacttgggccaagtgagatacgtgatcgtcaaatgacctgctgtagactaagatgctatcaaagaagactacaacacacttcctcaacaaaagggccaaagaagagttcatagcgccctgaaaggtaccaggtgctcccgacaatccaaaaggcatgactcaaaactcaaattgaccatgatgtgtctagaacgctgttttaaactcttccctaggcttcaacctcacccgatgataccctgaagccaagtccaatgtggtgaaccaacatgcaccatgcaactcatccattaactgttcaaagatggggatggaaaacgggctttgaccgttaaagcattcaaatagcgataatccacacaaaactgaaaagtgccatccttctttctcaccaacagcacaggagaattaaaagatgatgcactgggtctgataatccccgactgaaccatttctgccacctgacgttcaatttcatctttcggagctggtgggtatcgatagggtctgatattaactgggctggcaccagcaaccaatggtatactatgatcacaacttctttctagaggtaaggacataggtttagcaaaaaccgactgaaactggttcaacagctgaacaatttcaggaggaagggtagcctcatcagtcagagcaacagacacttgagatagggaaatctgaaccaacaattcgtcaaccggctctacagtttccccttgcaagagcacttgcacaccatgataagggatcaacatccatcgttgtttccaatgcacttccataggactgaaagtctctaaccaatcaagtcccaatatcacatcaaaggattgtaatggcaacaccttcagatcaaaggaaaacccatacccctaaattgtccattgagcttgagtaaacacttgggagcaagtcataacaccttcattagccactttaacctggagacaagttggtaccaaagtaatgtcggttaacctggaaatcatagtgtgactgataaaagagtgtgaactgcttgaatccacaagaataacgatttcatactcctgtatagaccctctcaacaaaatggatcctttggcccttgatcttgaaacagcctcagcagatagagccaagaagagttgttcctcgtggactgaatcttctgatggagaagactcattcagaaatgcaggcataagatcccagacttcctgcagggcatgaagttgaactgtagtattgcagacatgtcccctatgccatttttcagcacaacggtcacaaagaccacgtgcatgacgataagcacggagtgcagccagtttttcatcagtgcttcgatcagtctgcatgagacgctgcttaggtaaggatctcggcgcactggcacttgctgcagcagtagttggttgaggaagaggcagggtcgtcttgtgctgggatttcgaccaaataccacgatcacccttgcagaattcactccgcataggtggagcagcgacctcatcctgcaaaaaagcgagggaacaggcaatatccagatccatcgacctttgaagcataacaacagcacgcatatcatcgcaaagaccatccacaaaccgtgtaacaaaatataacggatcaaccccagactcatacacagagagttgatctacgagagaagaaaattgttcaatatattgagttaaactacctaactatttgatgcgaaataagtggtgcaacaacagctgatactggtccttaccaaaccgttcgttcatcaattgacacaagagaggccaagacaaacggggatgacgaaacataactgacagaaaccagcacgctactgtaggcgacaagtgcatagaggcaattttgacccatgaattcagatcaacttgatatatatcaaagtaattcttgcactgggaaatccacaaccgtgggtgcaaaccctcaaaaactggaaagggcaacttagacagatgacccagcccatgacccgacatgtcacccgatcgtgcacgagatgcagccatatcaaacatagatccatgaatacgaggtaggggatgaggatgtggcatagtacgcgtacccttgaccaggtcaggaatataggtcatgacaaacccgaatccctgattctggaggtaatgtttgtcgcggtgcccaatagggccgtcggtgtagaagcccgcaagtgtgcgcggtgctcctggctccgggtggggaaggagtcccgaatccattgccgccgactcgataatcgaaagatccatttgtttgttcagccgccaaaggtcgagcttgatgtcatccactgccgcatccacggcaggccgccaggacaccagatccgcctgggattgctccaattttgccacatgatcctctttgttgtggacgagatcgccaaattgtttctcccatttggagtccagcgccacaaaacgcttgtccatctcctccaacacgaatttcatggatggatccataaattcgtgacggtgctgagagcgaatgcccaaaaccgtagtctctgataccaaatgttacgatctactgatatttgctgcgaggatgtattcgcttggtgaaaacataattacagagtaacagtagcagggaagacaatagcgagaggataagaagaaacttgaggaagaagaagataaacgtagttctgttacatcttggcttcgtcgtaggtctcagcgagcatatatcttcaggtcctccattctgggccctagaatctcacattggccttacgctggcgtgttccccttctcggcccaactgtagtcttctcttgaggcccaccagtctccacattgctctgttgctgttgtagctcctcggacacggctgcttctgcctgctgctgcacctggaggtcttctgaagtcgactcgcgtggagagacagtgctgacataaatatagtaatggtgcaacggctatacgacacgtgagggcctaatggcaagctagtgtaatgaaacctctccataaaataaatttaaaattaaattggaccctcctcataaagaataaatttaaaagtagcaagctagtgtgatgaaacccaccaaaaaataattttaaaattaaagtggactctttccgtaaaaaaataaattaaaagttaaagtggacgtattacccacataataaatattaaattgcgatcactgcactttatctttgccaaaaggctaagaatgttgagttgaaatggagacatgcatcttttttaatagctacctcggtcgcttatcctcctatatctagcgatgtggtattattgagaagtgtttactgcatgtggtttcgtgtcatgttgggtttgaatattttctcagggtcatctaaacgataacaacagtcaagaccacgggtcagattagaaagaaattgtggtacccaattttcaaaaaaagaagttgaagtttattctttctttgtttttctctttcgggtcccgtactactggggtttggagttttaggagtcatacatcagtagcagtagaatttttgtttgacttgtacgcgggggtcagaagcaagcgtgggattggttttgggccgttgatctcgatccggcggtgggaagcccacttctttcccccccaaaaccctagccgcccctccctcttgtttcccttgtgcagctgccccccctcttgtcccttgttttggccgccccccttcttgtatcttttggctgccgccccccatctccaccttcctcaagttcttgcagcccaccacaacaaccctagccaccgcccccaacttcccctcccaaggtgcagccccttccccgcttggatctacgtcgtgttggtgcaagtctccaattggattttggtggaaggaaggagggataaaagggggagaattcaaggtgattttgtgattatctttttgtattagtgctgcaatccaattggttatttgtttacctatgcgaatcggtagaggtgttgtccagaaattttgtgggtgggcgaacagcagtagtattatcagtttctggggatttttcgtgggttattagtagtaatcattgtgacaatcaggtagggctttgtcatacctttccaaagagtacttatgcgctaaattcagaggtatattttaggagttatcgctgtttgaaaccggctaggttgctgtccaaaaacagattgcagggtgtgtcttgtgggctgtttggggccatttagatgttggaatttaatcatcgtttgaatacaaaacttgtggggaattttatgtagatggtttgggagttttttttgttaccactactgtcataattttaaagatatgaaattgtcaagcagcgccactgcagttttggtgggtgatggggagagaggtcgctcgcgacgggtttggaatcgtgcgtatgtgcggcgttgtttatgagcgttggttatgtgaatttgtgcactaagttgtgtgtcaaaaacaggtggtggacctccgggtcgttcttagggccttgtccaaatttccggtgaaggcaagtaaaatagtgatggtttataccgttggttgatttatgtgtcctatacttgattacatccatgttaaatgtgttctttctcgtaatccattttgagaattattgcttgaagctaatcatgttttattatttacatatgttgaagatgttgttcgagcatgttatatgcattgattattatttggaaggaatggaattatatatgtttaacacatgttatttggggtggtctcatgttggtgtcatgcatagtgcatccatcattctttgcatggaagtttcttcgcgatcttatggtccaaccgtaccggtacaataagcatcatatgttgcccgagaaggggtatgatgcagcttcatatccttagaggtatggaggcagaagtcattactgcatctgtagccatgtgcattcacgggtgaaatgtggaacctgttatggtggtgtggatattgtggatattcactttgtgtttcattttggaactgagtaattgttatcttgtttacttgctgcaatttgatattcaagaaggaagttgtgaactatgtggttgttaaatcacggtttgtttacattgtcaaattgttatttgatcattttacttgctgagatgtgtcatctcacacttgcattgtttgatgcaggaacttgatctttgcttttgggaaaggagggaagtagcagcacggtcactacatccttaaataattgtaccactgcttagtaatgatgttaaacagtggtttcaagtcaagggggttgattgttatgaaatagtgcgtgccagggaattaataagttctagtccacttggtggctgactttcttttggtttgctgcattcattttattttggtcattaatgttcattactacctttgcatcctggttatacactgtggattacccatcttttacatcatgtataaactctatgtgcctctcgttatgctactttcaagggaggtgctgccgaatttttctttgattcctgtcttcatttcttttattatgttgtttgagtttgtagagagagtatttggtaacactcattgtgtgggagcattgaggtgttacagaaatatagtgacttctttttttacagaagggacgacacgacagtgaactaggcaaactgacataggagaaagagataacgaaaaccttaattttaggctcgaataaaaactatcaccggaaaaaaaacataaaatgctttcaggatatacatggttttggggagaataaactagttctatcaaatccttttttctagtgtgttccaactagcccgttaaggcgttcctagagtcaatctcgttaactactctaaattaatctaggaagataaagatcatataaattacacacaagaaaaagtaatagatatgtgttttcaatctagcaccaatgagtaaatttgtgtatgtgcattttaggcatggattctgtgctaaggggacacaagagttatactggtttggacagaacgtccttactttcagtcttcgatcgcttgtgctaccgacacctgattgctcgaagtggggttgcaagcgacagagagagggaaggatcccaagtctctgtgagtcgtttgtctaatgtatgacctgatcactagaggctctaagttgcttgtttgttcactctctgtgagcctaggggttttcggttgttctcctcaccccttctactagaggttgatcctattccttttataggccaagggaagggtggcttacatatatgttctctcggaagggagcataatgttagggtaaaagaaatggtttcacccctggttaaagtcttgtcgtgtgccgatatctcttcccgtgcgatcgcctgcagtgcctctgaatttgctggggacttttggtccgtgttggtgaaggaagcccgtgcgtcaccattatttatcctcttctccccacacccaccttctgcctttgtggcccgaccgccgaccttctttgtcgttgagtgagctcgtaggacgtcaggggactcagaccaagagtacataggtcatgagtggggctcgaccttagatttggtagggcgtcgaagggatcagacctagcatccttgggtctcgagtgggcacagaccaaggattcataggctacgagtgggaggaagaccgatgtgcacccacactgtgtcctactgcttcacgtaatcaatgtggcatgtacgaggtgtgcggcgagagcaatccgataggcacgtggcgcccgcttgggtggtcccccgattgatccgcctaacccctcgctccagcctccgcttcgcttcacccctggttcaatgcgcagggatcgttccgcagtgaggcggtttttactcgggcatgcgagcttattgttgtcttcctactaaactgtgggaccctgggggcctagggatttgatctccgacagtgtctcttgagtcactttggggagtgtgtctccctttgggctgatttggtgaccagggagcacaggaggattggaggggattgagggggaaattagttcatttccccctcaatcccctccaatccccccgtgattcacttgtcaccaaatcaacccttagtggcttccttagggtcgagcggtgaccattccatttttctcttgtttctcgatttttatgcttggggagcaaggattctctaggggtgctgctggttcttggcccccttctctccggggttaggattaaccctcgtccaggtggtacaggccgttagggctttcgagctaaaacttcgcgggctagggtgtttgcgcactatgccacgcgacacttggctaattctttagtatcagaccatcaggtggccagtgaacgttattttcttcagattgctgaaagggaaatagggttaaccatttcctataattaatttttgtggttgacgaccaacacaaacacatggactaactagtttgtctagaattcatgtattacaggtgcataaggttcaacataaaccaagaaagatatcaagttagggacacaatttaattggagcaaaatgacttgagtgtgctggaaaatggtgcactgaacattgtccggtgtgccagcggagcaacgactccctgggccaacggtcgactctgcaaaagcaatagtgtcgtgacagagtcagaagcgcagaagtcagagggcaccggactgtccggtgtggcaccagactgtccggtgcagctagaagacaaaggtctccaacggtcaactgctcaaaaccctaacgattgcgctgacgtggcgcacaccggacagtgcatagtgactgtctggtggcgcaccgaactgtctggtgcgcccatcgccaacagaattcagccaacagctagaagtggttgggaggctataaatacctccaaccacctcattcacttccatccaagccttctgaaatcttcattcattgcaagagcaaaagcccaacgctccaagacacaatcaaagcaatcaattctctcaaagtccccaaaatcaactctagtgcattagggcttgtgagaggatcaattgtgttcttttgttgctcttatcgcttggattggcctttttcttttcccttctatttatcaagtgacttgtaatcgaagcaagagacacctgtcggtgttttgggtccaaccgcacacccggggttgcccctcaaggtgtttctaggagtaggaaggtgtcgacgactgtagcaaaatggttcgtgccaatcgcacgagggacagtggacaagatttacaggttcgggccgcttagagatgcgtaacaccctacgtcctggcgagtatgcttggtgagcgtggttacaagagggctctctggattgaagacacatagagctgatgtgggtggctaagtaagatagggtcgatcgttctgaaggggtgccccctaggccttatatactcgaccgtggggtagtacacgtggatatgataacaacaagtagctaaaaggtaatgaacctcttgagtttatccctacgtaaccctcgccgacttatccccgcatggctccgttgcatgggggcttcagcgcgggaaagtcgggtctctgttgcgattcactcgctcgacgttgtgggccgtccgggtttgcaccaatccagcttcacgtcgctctgctttgttggttgtttctccccaggctcacgaaagaatgaccttacgatttattgggcccttgggcctttcgtgaggtcttttactcctttagtggacccgggggatatctatcccccaaaagcccccgatctttgggttaatttagaggtaatcagcccaaagatcccaggtccaacttgcgggtgttttgaagaaaaatgacttcctgctgccttctcttgctctgatcactcatttgaccgaagcttggtttcatgcttgtgccttagaggtcggcatttcaatttgtaggattttgaacttcattgggtgcaccggaggtgtacccaatgggtgtagcccccgagctttgagtagattttagaaaataatctactcgaaggtcttccccagaaattatctccatttgtgctcctgcatcttggttgagggttggtcttttaatcttgtcctacgccttagaagtcggcactatctcggcttggaatgataatccatggggtgcaccggaggtgcacccaatgggtgtagcccccgaccttcaaatggattttttaaggataatccattcgaaggtcttcctttcgtgcctctttgctgaaaattatccctttcgtttgtaaaaaattggcataaagctatttgcattatgctttggaggtcagcattatgtcatcaatattttgctgtagaggtcagcatatattttgtctttagcagccgagtttgcaatccgtccatatcttgctaggtgtgcaatttatttgcttctgcgactgattggacgtttgatagacgttctctgtcaagtcttcacgtcgcttctgtcggccatatcttgtactttgctggctatatttggctttcctctgatccttactgatatctcatttttgtcttgaggtattcactgcgtgccctgcacagatgtgaccgttttgaaaaatatactgataattcctgggcgtccccccccaatgggtgtgggcaagggacgacttggtacgctgagtgttttatccggctgcttctgagtagtaatgtgatgggacggcgggtgtaatcatatcctttgcgctgttgactggagtcccaatgggtgtaatgttgcatgaaacgacgtcagccgcctgacgtgtcttcagacgagtggaagtgcttattgaatgctttgcgactgttcagtgaccgcggttggaggtgagcggttgtctttcccttctataaataacaccgttgcccctctggttttttcacatctcttcgctgttctttactgcatccttctcttctctcccgtctgcttccggcatgggcaagagtaacaaacgcaagcgcgagccgactcctccgtctgaggacttcggcgactcggaatactcggaggaggagttctcctccgagtccgagggtctccggctcccgtctctcccccggcgtcgtctgatgattcagacgactcccaggggattgccgcggaagtctggacgtatatccgggccgtcgagcgctccgggctcgagggctcggatgagtcggagtactcctcggatgaggaggactcggacggcggcgaggacgaggatgacgacgacgacgacgacggtggcgactgcgacggtgacggcagcggcagcggcggggacgggagcaagggcagcaccaggggcggcaacagcaagggcagcaccaggggcggcagcagtaagggcagcaccaggggcggcggcggtggcagcagcagcaaggccagtggctaaacgccactggtctttagatattagtgtagtgtagttagaataatgtaatagtaatgtagagtagtatagtgtagtatagtagtagtagtaatgtaatgtagtaataatagggaagcatcaactcgcaaagagttgatttgtaagcttattgtcttcccttaatgaaagaatgacgttggcttcttcttgatgactcgctttgcttgattatggaactgattcttttgagatagtagatgaataacttgggcatcacattgacgcttccagaagtagctgccgagtaatcttgtagtctatatcaacgttttagaaataatgccgagcgactgaacgctatatcagcgtcttagaggcaatgccgagtgattgaatgtcgacgtcggcattttagaagtagtgccgagcgattgaaggtctacatcggcattgtagaagtaatgccgagcgattgaacacgagatcagcgctttagaagcaacgccgagtgattgaaggtcggcgtcggcgttttaggggcaatgccgagcgactgaacactatatcagcgttttagaggcaacgccgagtgattggaaagcgacgtcagcattttagaggtaatgccgagcgactgaacgcgatatcagcgttgtagaggcaacgccgagtgattgaaggtcgccatcggcattttagaagtaatgccgagcgattgaacacgagatcagcgttttagaggcaacgccgagtgactgggtggtgacgtcggcattttagaggtaatgccgagcgactgaatatgaaatcagcgttttagagtcaacgccgagtgatgaggtggcgcatcggctttttggaaataactgccggatgaccacgtggcctgctggggttttggaaataaccgccgggtgatgactggacactttttgaaacgatatctggctcgagaatatctcataagagttgcgcttttagccgcctttgctttccgtgccttagttcttgctttcccgcttccgaatcctctctgccattcgcctcccactctgctcgctggtagaatcgagatggcacccaagaggaagacctcgagctcgtctgctgtggtgattcctccaatcgaccccaacagccagttgcctttcacaggtaaccacatgtccatcatttctgaaactgaacttctccacctcgtatctatcggggttcttcctccgcgagaactccgttcttggcggatttgccatgggtttactgttccgacagaggatacccatgagtccgttgtttacgcccctttccttctccgcggccttggccttcccatctctccctttttccgcggcctccttgatttctaccatattaacttgacccatttgaaccccaattcaattctgcaaatctccattttcgttcatttatgcgaggcctttcttggcatgctgccacatttcggtttgtggaaatacttgtatcattgtcgccctgggatggccgggggacaacatcagttggtcgggggcgccagcttggagatgcgccgcgggaggaaaactgaatatctcgagatccccctcaaggacagtattaagggatggcgcctagagtggttcatagttgagaattatgggaattctctcccctcccggacgggaagacagccggacgttcgcaccccaagctagaccgagtctcccacagatcaggaagtagctgaggcaggtgtgttgctagctgaagttggactgctgaaagagaggggtctgactactgaagctgtggttactgattttgttttcaagaatattcagccactgaaagacagggcctatccatcttatctgtatcgagggctaaccgactcaactcgggttaccaacaggagaattccttctgcagacttggtgagccgacttgaaatgatcctcaggggcaaggtgtcaaatgttggtgctccagtggcgtactcggcctggaatctgcctcctcccaaagccttcaccctttttgtgtcgaatccacccattactgatggcagtttgggccttagagtgcgaccctctgctgaagaagttagtgctttggttgcctcgcttggggagattcctgatgacgaacggcaggttcattttgaggtgcccctgaaccctagtgatgcagagataagcgctatgcttgatttgctagctgaggattcatctgatgctgctcctgctggggcgttggtagtggcgcccctcccagaggctgatacgactttggatgttcagaagcctgtcagtgctcgcccgaggcgcccttgtcgaaccaatcagcctgatccttctgctgatgagcagaagaagaaaagaagacgcctccggcgagtatccagttttgatcaggacgctggtacctcggttcctgctactgaagaagtgcctgcgactggatttactgacgctgaccccaatgggtgtacccaatccgctgttgatcccaatgtgggtgccccatctgttgctgatcccaatgggggtgctgcttgtgttgctgatcccaatgtgggtgccccatctgttgctgatcccaatgggggtgctgcttgtgttgccaatgtggatgatgaggaggaagaaaatgagattcctttgactcggaaaaacagtcggcagttcatcgccagtggtgaaagtagtggagttccctctcctgctttgtctgccctcattggtctgcaagaactgtccctagccaactttgatcagactctggaggatatggtcccagaggacttgttatcggagccagtggatgatggtgcaatggaggcttgcgctgacgtgcccgatgctgggttgaggtcatcccgtgcctcgtcgaccttagagcgcgatctcgagggtcgggagactgacttggatcgccctggtcctatggaagtagctgagggcccgtcaaccttagaggtggttactgcagagagcttggacctcaagaatgttgctgacacatgcccagcccccgagggtgtcgccggggatgacttagctcgggtgaagagtgtaagccactgcccagcccccgagggtgctgccggggatgatccggctcaagtgggcagtgcaaactatgatccagcccccgagggtgcccgagcagggtctccttcctgtacttccatggacgttcatgcgggttctcctccacactctggctgtatggtggtagctcaaaccttggaccagggagtcgctttagagggcagcgtccccgctgatcgagtgtttggctctgttgaaggcaccaagctgattcctactggttcattgcaagctgcttcgggtggtggccttacgcctagttatcaactgatctctcctgatttggggatcccttcgttcttttccaacctccaggtactgtgatgtattttagcttgattttcacattgtatgaactgctgtcattacactcatctgttttcctcatcagactttggtggatgggatggctagccagctgaggctacagggtgcttccgtcccagaagtagcttcgtctcttgcatgttggaatccagtgtcacttcaacatcgcgtctctgaattggaggcaaccaacgctggttagtgcctttttgcttctctttgccttcactgtggacggctttaccttctgaccccgttttgtttgattatctcttgctaggaatgactcggcacatttcaattattgaggaaaaacattcccgagatcaggttgaattggtccagcggtgtgctgacttcgaggagaagtactctcagagccaaactgaactgggtcaagtctctgctgccttggatgacgccaatgcactgagttcttctctccatgctcagctcgattctgaaaaggtaatttacaaaactgtgctttgccttgttgtgttcctattacttgcttggtttttgaaggagttgatttttgctcgcaggaagaaaaacgcaccctcgctgcctctcgtgacagtcttgacagattgtatcgtgattctagcaactcgctgactatcttggagaggagtcaccgctttacaatggaggaattggataatcaacgctgtaagctgcagtagtccacggacgaagtgacccgcctcaagcagttgatatgagcaaaggatgctaccatcaaagaactccgagcttacaagaaatccattgttcaagagttagaaactgctcgactggctgctaaggttgccgaagagacttctgttactctcagagcccagcgcgacagagccatggacaaggctattcgggcgggacgaatcttgatgaggagacccggcgtggttgttcctgaagacataagggctgatgtgaatgctgccccctgattcctcgagtcgcccttcttcgtcggtcgcacctgagaaaaacattgcgaaatagagaaatattttgtgtgctttgagcgcgcggttagcatgatcgagtattagttagaggacatcagttcagcattcgaatgatataattactctcttattgtttcagaattcatcagttcgtaaatttgcagcagtgaaatgacgcgcgatgattatgaagtttgtttgcgggatatagaagtcatcccctgaattgcataggcatgagcatgttgcaccggcttaagtcgccactgactttagccgattgctccgttagtagggcatagtggtcaccccgagttaagtaagcgtgagcatgttgcaccgccttaagtcgtggccgacttaagtcgattgctccgttagtagggcatagtggtcaccccgagttaagtaagcgtgagcatgttgcaccgccttaagtcgttgccgacttaagtcgattgctccgttagtagggcatagtggtcaccccgagttaagtaagcgtgagcatgttgcaccgccttaagtcgttgccgacttaagtcgattgctccgttagtagggcatagtggtcaccccgagttaagtaagcgtgagcatgttgcaccgccttaagtcgttgccgacttaagtcgattgctccgttagtagggcatagtggtcaccccgagttaagtaagcgtgagcatgttgcaccgccttaagtcgttgccgacttaagtcgattgctccgttagtagggcatagtggtcaccccgagttaagtaagcgtgagcatgttgcaccaccttaagtcgttgccgacttaagtcgattgctccgttagtagggcatagtggtcaccccgagttaagtaagaatgcaagtcaatcgtaaacgaactgagtatctttgaaacctcttttttattaatgacatatttccactttacagaatacatcgtcgtcccagcagtttttgaaatacagctagggataaaactttctgaggtgttctatgttccaggagttcccaacttctgtgccatccatctgagtgagacgatacgatccgggccgagtgacttctgctaccatgaagggtccttcccataagggcgataacttgtgtcgtccctcccccgttagaattcggcggaggacgagatctcctactgagaaggatcgttgtctcacagccttgtcgtgatagcgccttagagtctgctggtaccgtgctgattggattaccgcgtttagccgttcttcttcaagtacatcaatgtcctccagcctggtggcctcagcttctgctatgctttcgaagatcaaccttggcgccccaaacttgagatcagcgggtagcactgcctccgacccatagaccatgaagaaaggagtgtttccatgcagggctcggctaggttgggttcttaggctccaaacgacatagggcaattcccttatccactttcctacgaatttttcattcttgtcaaagacctttttcctgagtgcctccagtatcatcccgttggctcgctcaacctgcccgttggctcgtggatgtgctacggatgcatacttgatctgaatgctcttttgctcgcagaagtcgaagaactctgaacttgtgaagttggatcctaagtcagttatgatgctgtttggtatcccgaatctgaatattatgtcttgtatgaattccacggccttagcagaggttaaagaagcaatgagcttgatctttatccatttagtgaatttatcgattgctaccaatacgtgagtgtatcccccttgagctttcttgaaaggtccaatcatatccagtccccagcatgcgaaaggccaagttactggtatggtctgcagttgctgtgctggcatgtgttgttgctttgacaagtattggcaagcttcgcacctctgaactaactcggctgcatcattctttgctgttggccaatagaatcctgacctgaagaccttcccgactagtgttctggaggctgcatgtattccacattgcccagcatggacctcctccagaagttgcttcccagtggacgggaggatgcacttcatgaagacacctgacgcaccccttctatacaatgtctccccaatgagtgtgtagtgagtcgactgcctggcaatgcgctcggccgagttcttgtcatctggttcttcttcattttttatatacttgatgattggccttctccagtcatcagagtctgactcaggttgatctataatgttgcactcttctgtttgatctattgagatactcggctgcagtatttcttgcacgaagactccgggtgggacctgagctcgactggatcctagcttggacagtacatcggctgtcgtgttccggtctctttctacatgatgaaattccagaccctcgaatttatcttccagctttcggacggcagtgcagtattttcccattgaatcacttgaacaatcccactccttgtttatctggctgatgactaccagagaatctccgtataccatcaatctcttgacgcctaatgagatggcgatgttcaatccatggatcagagcttcatactcggctgcattgttggaggccggaaatagcagctggagggcatatttgaggtgctcgcctccaggtgcggtgaagagaattcctgctcctgctccctgtaacttcagcgagccatcaaaatacattcgccacacttctgcagtctctgggttatctggtacttgctgctcagtccactctgatacgaagtcaaccagtgcttgagttttgatggcagtgcgaggttggaactcaatgtcgtgagatcccaactcacaagcccatttggctatccggccaatggcctccttgttgtgaagaatatcccctattggaaagccagtgactactatgactttgtggtcatcaaagtagtgacgtagcttgcgggcagttagaagtactgcgtataatagcttctgaacttgaggatactttttctttgaggggcctagaacttcactgatgaagtaaacaggatgttgcactgggtaggcatgtccttcttctactcgctcgactaccaacgcggtgctcaccacgtgagtcgtgcaagagatatacagtagcagatcttcaactggttgagctgacgtagcacgtcagggtggtttcagtactggtggtgttgtcaagaatttcttcagcgcatctagagcttcctgtgcttctgaagtccactgaaacttatccaccttcttgagtagcttgtaaaacggcaaacctttttcccctagcctggatataaatctgctcagagctgccatacatccagtaagtcgctgaaccttcttttgtgatcgaggtgcttccatcttcatgatagcttcaatcttatccggattagcctcaattcctcggtggctgacgataaacccgagtaactttcctgccggtaccccgaaaacacatttttcaggattaagcttccatctataccgtctcaaactgttgaaaaccagctgtaagtcttcgatgaagttttctgaactctccgttttgattaccacatcatctacgtaggcctccacacgcttgccccagtgatcggctaagcacgtttggatggctctctgataagtcgctccagcgtttttgaggccgaacgacatggaggtataacagaaagcaccaaacggagtgatgaacgccgttttttcctcgtcttccttcgccaaactaatctggtggtatccggaatagcaatccaagaaagacagcacagaacatccagcggtggagtccaccacctgatctatcctcgggagcccgaagggatccttcggtcagtgtttgttgagatcggtatagtcgacgcacatgcgccaatccactttattctttttgagtacaagaacagggttggctaaccactcggggtgtaacatctctctaataaatccagccgcgaccaagcgagctaactcggcgcgaatggcctctctcttgtcgggcgtgaaacgacgtagcttttgccgaatcggccttgcctggggatagaccttcagtttgtgctcggccagttctcttgggactcccggcatatccacaggttgccatgcgaatacatctcagttatcttgcagaaactagacgagcgcgctttcctatttgtcgtccaagctggagctgatgatggcagtcttgcgttcatcagcgaaccccaggttgatcctcttggtttcttcagtcggccgcatagaggtcgcggcctgagcttcgtttgccggtactgcgaggtcctcttcaggcttagagttcgccagtgtcgaagaaaccgccgacggcttggtggtgagggctgcttgaatggccactcggaaacactctgcggcgccttggaagtcggcgcgcacagttatgattccttgcggccttggcatcttcagtatcatatacgtgtaatgagggatggccatgaatttggccagtcccggcctcccgatgatggcgttgtacccgcagtcgaagttcgccacttcgaacctcaggaactcggttctgtagttctccggagttccgaaggtgactggcatgtagatgtggcccaacgggtattccccttccgtcggcacgatgccgaagaaaggagtgtccgactcgtggagctctttgaggtgaactcccaagccttggagtgtccgggggaaggtgacattgatgctgctccccccgtccactagcaccttctttacccggctctctcggatcaccggatcgacgaggagcgggtatttgcctggatggtcgaagttgagccattgatcctcccgagtgaaagtgatcgggtgttccgaccaccggtatggggcgggaggaccggtggtcgccaccagtatctggcggtcgttgagcttttgttgtcttttgttctgctgcgacccatgtccgccgaagatgacgttgacctccctgtcgacgcgtgggaaagctcctcctcctccctcctcctgctgatggggttgtcgtggttcatctggtcctcccctcggcggaggaggaggtagaggttggaagggtcggccgtgtccgacggaatgcttgaagtcccgacagttacgaaaagtgtggcgcatgtccttgtggtacgggcactgggcgtcgaggatgtcgtccagcgtgcgttcgcctccacgaggtcctcctcaggcacgagaggcaggtggtccggcggcgtgtacttcttcgcgaggcctcttctcccatcgtttgtcgggttgctggttcgcgtcgcgtcgtggtgctgccggtgcgggctttgttcctccgatgaggtcctgggcccgctcgtcggcggtgatgtagaggtcggcttcccggaacagctcctcggaggtagtcggcgctttctgtagtatggctcggacgaaagccgagtcgttggatcctctgtagaagtcctcgatcacggccgcctccgtgacctcggggatacgatttctcatggtctggaaccttttgaggtacgaccggagagtctcatccccccggcgcttgatggatttgaggtcccacggttgcgccgacttgtcggagagggactggaagttggcggtgaagcgtcgactgaagtccccccagtcgtcgatgtagtgtcggggtagatgtcgcagccattgcagtgcgtcttgcccaaggacgatgggtaaatacgcggtcatcacgtcttcggacgccccggcagctcgagcagcggtggtgtagacggctagccaaccccctggatcctgcttaggttcatatttgtcgacattggataccttgaagttgggaggccattggatggccctaaggcgcggagtaagagcggacactccgcacgtgtcctcctgtcgtcggggatgatgtctgtcccggggaggggagttgtggttgtggttcctcgaccgtccccgggtggtaccgccagttgaggccgttgccgactcagttctggtggcctggctctgagccgggatgccatgatccctgtcgtactcctcccggcggcgaatctcgttctcatgccgccgttcgcgcgaagcattgatggagcttcgcgcgtctcggcgactgttgatggcgtgtcgtagatcgttcggtgggtgagcaagcggtagaagatggttggccgcctgggtgaacagtcgtcggtagccctcagcgtcgggagtctgaggaagtccatcagctatccgagctagtacccctccgacttcgctcggcgtgttcatagctcgggcgaagtcgggattcaggttgcgcccgaagaatggattctcccggcgttgccttgcatcttgctcggcttgttcctgagcccgtcggcgatcacatcgtcgggagttccttcgttctctgaagacgcgttcttccggagtttctcctatctccgagatctcgtctcgcgagacaggctgctccggatcccgttctccggccgcgtgatgtcgccgaacgttcctgcgtcgattcctccgtcggcgggattctcgttgaggcggttcctctccgggcgcggtcggttcgtcgtcggagatggtgggcgactccactctcccgatgaagaggacgtcggggtagaatggtgctgctgtcgtggcgactttctttccattctcctttgaagccggaggaacggaaagaacgacttgcttttccctggtctccttcttcctcgcgatccgtgtccattcttttgtcggggaagtagacaacggagtcttccgggtcagcgagccctcggcccccgactttccggagacgatcttcttccgaagagctagaggttgcgcctctccggcattttcggagttcgttggaggagacttcttttccggcggatccgcgatacgatgtagaattccctcttcatccgctacagatgagattgtcccgaagcagaatacggatccgggacgcatggtgatcttgctgtagaaggtgacggccattgagctagcttggatcgtcgacacaccccctacctggcgcgccagctgtcggtgttttgggtccgaccgcacacccggggttgcccctcaaggtgtttctaggagtaggacggtgtcgacgactgtagcaaaatggttcgtgccaatcgcacgagggacagtggacaagatttacaggttcgggccgcttagagatgcgtaacaccctacgtcctggcgagtatgcttggtgagcgtggttacaagagggctctctggattgaagacacagagagctgatgtgggtggctaagtaagatagggtcgatcgttctgaaggggtgccccctaggccttatatactcgaccgtggggtagtacacgtggatatgataacaacaagtagctaaaaggtaatgaacctcttgagtttatccctacgtaaccctcgccgacttatccccgcatggctccattgcatgggggcttcagcgcgggaaagtcgggtctctgttgcgattcactcgctcgacgttgtgggccgtccgggtttgcaccaatccagcttcacgtcgctctgctttgttggttgtttctccccaggcccacgaaagaatgaccttacgatttattgggcccttgggcctttcgtgaggtcttttactcctttagtggacccgggggatatctatcccccacaacacctaagtgtgtggtggtccttgtggggtctaagtgacccaagagattaaggaaaaggttcactcagtctaagtgatcgtttgagagagggaaagggttgaaatagacccggtctttgtgacctcctcaacggggactaggttctttggaaccgaaccttggtaaaacaaatcatcgtattcactcgacttaattcttgtttcatttgttttcccctctctaacgtttccttgctattgtgaatttgagttggctcccatacgtcatctgtaatccttgagcaactcctagcaagagagatattcttttggacttgaatttaattctaacgctaacccccgaccttagtgtgtgtttaagtttataaatttcagattttgcctattcacccccctctaggcgactttcaattggtaccagagccagtgcttcattaagagtctaaccaactcgaagtgatgtctggagatcacgccaagagggagatcatgaccggcgaaaaggccacaagcttggggaggactctctcaagggagtccggcaactaacacaagaaggaatcctcttcctccatcaagtcgcatcggagaggtgacaagaagaagaagatgaagaaggtggtctactacgagaccgactcttcgtcaccctccacatcaagctccgagtcgtccagtaatatgccctacgctattccccatatttcaaagcgcgctccattactttccgttcccttaggaaaaccaccatattttgatggagatgattattgcatgtggagtgataaaatgaggcatcatctaaccacactccacgaaagcatatgggacaacattgaatttggagcgcaggtaccaaaggtgggggacaaagactatgactcggatgaggccgcccaaattaggcactttaactcccaagccacgtctatactccttgcctccttgtgttgggaggagtataacaaagtgcaaggtttaaagaatgccaaaacaatttgggacatcctcaaaaccgcgcacgaaggggacgaggtgaccaagatcaccaagcgcgaaacgatcgagggagaactcggtcgattcatcctcaacaaaggagaagagccgcaagccatgtacaaccagctcaagaccatggtgaaccaagtgcgcaacctcgggagcaccaaatgggatgaccatgagatggtcaaggttattcttagatcccttgtatttcgcaatcctactcaagttcaattaatacgtggggatcctagatataaactaatgtctcccgaggaggttattggcaagtttgtgagctttgaactaatgatcaaagactccaaacacattgtcaacttggagcaaggtgccacctccacacccgaggtgcaacccattgcattcaaagcaacggtcaacagaagaagagaaggagtctacatcaagtaggcttccaatcgacacctccaagctcgacaacaaggaaatggcgctcatcatcaagagtttctgccaaatcctcaagcaaaggaggggggaggactacaagccccactccaaaagggtgtgttatcgatgtggtaagtccggtcactttattgctaaatgcccaattctagtgaaagtgacagggacgaagacaagaaagggaataaaaaggaaaagaagagatactacaagaagaagggcggtgatgcgcacgtgtgtcgggaatgggactccgacgagagctccaccgactcctcctccgacgaggacgccgccaacatcgccatcaacaaaggcctcctcttctccaacgtcggccacaaatgtctcatggctaaggatggcaagaagaagaaggtatactctagagccaccccaaaatatactacatctagtgatgagggtagctctagcgataatgaggatgatttactttctctctttgccaaccttaacatggaacaaaagaaaagattaaatgaattaattgaaaccattaatgagaaggatgacatcttggaatgccaagaagacttgctcgttaaagaaaacaagaaatttgttaagttgaaaaatgcttatgctcgggaaatagaaaaatgtgaaaacttatataaggagcttagcatttgtcataattcaatttcaagtcttagaactgagaatgctagtttagtttctaagattgaaaagttgaatggttgcaatgattcaatttctagtcttagaattgagaatgataaattaaatgctaagattgaggaattgaatgcatgcaaaccatctacatgtactgttgatcatgttactatttgtaatagatgtagagatgttaatattgaagctatggatgatcacctttccataattaaacaacaaaatgatcacatagccaagttaactgctaaaattgccaagcatgaactagaaaatgaaaaatttaaatttgctcatagtatgctttataatgggagacgccctggcattaaggatggtaatgggttcctacaagggaaccaaagcaatgtcaaacttaatgcccccaaaatattgtctaattttgttaagggtaaggctcccatggttcaggatagtgagggttacattttatatcctgcaaactatcacgaacacaaaattaggaagattcatactatatgaaacctcacaatgtttctcatcatgcattcatgtataaaaataaggcttctagctctaagcataccactcatattaaaatgcctaaaacgaaaattcctaatgcatcaaatgaacataacatttcatttaagacttttgatgcttcatatgttttaactaacaaatcgggcaaaatagttgccaaatatgttgggggcaaacacaagagtcccgagacttgtgtttgggtacccaaggtgcttgtttctattgtgaaaggacccaagaccatttgtgttgtaggtttatgcatccggtggttcaggttggataatcgatagcgggtgcacaaaccacatgacaggggagaaaaggatgttctcctcctacgagaaaaatgaagatccccaatgagctatcacattcagggatggaaatcaaggtttggtcaaaggtttgggcaaaattgctatatccctgacattccatttctaatgtttttcttgtagactctagattacaatttgctttctgtttctcatttatgcaaaatgggctacaactgtctctttactgatatagttgttactgtctttagaagaagtgatgattcaatagcttttaagggagtgctagattgtcagctatacttagttgattttaatgataatcaagctgaactagacacttgtttaatcgctaagactaatatgggttggctctgtcatcgccgacttgcccatgttgggatgaagaatcttcacaagcttctaaagggagaccacattttaggactaaccaatgttcattttgagaaagacaggatttgtagcgcatgcaaagcagcaaagcaggttggagtccaccatccacacaagaacataatgacgactgacagtccgctcgagctactccacatggatctattcggtccgatcgcttacataagcattagcgggagtaagtactgtctagttattgtggatgattattctcgcttcacttgggtattctttttgcaggaaaaatcacaaacccaagagaccttgaagagattcttaagacgggctcaaaatgagttcagattgagaataaaaaagataagtagtgataatgggacggagttcaagaactcacaaatagaaggttttcttgaggaggagggcatcaagcatgagttctcttctccctacacaccacaacaaaatggtgtagtggagaggaagaatagaactctactggatatggcaaggaccatgtttgatgagtacaagacaccggaccggttttgggcagaggcgattaacaccgcttgctactccatcaaccgactctaccttcaccgaatcctcaagaagacatcttatgaactcctaaccggtaaaaagcccaatgtttcatattttagagtctttgggagtaaatgatttattcttattaagagaggtagaagttctaaatttgctcctaaggcagtagaaggctttttactcggatatgactcaaacacaagggcatatagagtcttcaacaaatccactggattgattgaagtttcttgtgacattgtgtttgatgagactaatggctcccaatggagcaagttgattttgatgaactagatgatgaagaggctccgtgcgtcgcactaaggaacatgtccattagggatgtgtgtccaaaggaatccgaagagccttcccaaacacaggatcaaccatcatcttccaatcaagcatctccaccaactcaagatgaggatcaggctcaagatgatgaagatgaagatcaataggatgagccacctcaagaggaggacattgatcgagggggagatgaagataatgaagacaaggaagatgatcaagaaattaaggatcaaagaccaccacacccaagagtccaccaaacaattcaatgagatcaccccgtcaactccatccttggtgacattcataaaggggtaaccactagatctcgagttgctcatttatgtgaacattactcttttgtttcctctattgagccatataggatagaggatgcactaagagatccggactgggtggtggcaatgcgagaggagctcaacaacttcacaagaaatgaggtatggcatttagttccgcattctaatcaaaatgttgtagttaccaaatgggtattctgcaacaagcaagatgagcatggtgtggtgataaggaacaaagcccgacttgtggccaaaggttattcacaagtcgacggtttgtactttgatgaaacttatgcacccgtagctaggcttaagtcaattcgaatattacttgcctatgctacttaccatggctttaagctttaccaaatgtttgtgaaaagtgccttcctcaatgaacctatcaaggaagaagtttttgttgagaaacctcccgactttgaagatagtgcgtaccctaaccatgtttacatactctcaaagacgctttatgggctcaagcaagccccaagagcatggtatgaatgcctgagagattttcttatcactaataggttcaaagtcgataaagccgatactactctctttactaaaaatgttgcaaaagacttgtttatacgccaattttatgttgatgatattatatttgggtctactaacaagtcaacttgtgaagagtttagtaggatcatgatacataaattcgagatgtctatgatgggagagttgaagtatttccttggatttcaaatcaagcaactccaagagggcaccttcatcagccaaaccaagtacattcaagacatacttaagaagtttgggatgaagaatggcaagcccatcaagacacccatgggaactaatgggcatctcgacctcgacacgggaggtaaatccgtagatcaaaaggtataccgatcgatgagagattctttactctacttatgtgcatctcgaccggatattatgctttctgtatgcatgtgtgcaagatttcaggcaaatcctaaggaagttcaccttagggtcgtgaaaagaatcatgcgatatttagtttacactcctaagttcggactttggtaccccaagggatatacctttgatctaattggtattccgatgccgattatgccggatgtaaaattgataggaagagcacatcagggacttgtcagtttctagggagatccctggtgtcatgggcttcaaagaaacaaaattcagtagctgtttccatcgccgaagccgagtacattgccgcaggccattgttgtgcgcaattactttggatgaggcaaacccttagggactatggctacaaattgagcaaagtccctctcctatgtgataatgagagtccaatccgcatggcggataatcccattgaacacagtcgcactaagcacatagacatccggtatcactttctgagagatcaccaacaaaaggaggatatcgaaatagcttatgtgagcacccacaaccaattagccgatatctttaccaagccattagatgagaaaacctttagcaaacttaggaatgagctaaatatacttgattctcggaactttgattgagacattgcacacatagctaatgaatatacgactaatgtgctttcaagtgcatttctatacttagtcgtagattgaaagggaaatggagttttcggcaaagacaaggcttccactccaactctgacggtatcatttattctttgtcgttactcatgtcactctcattggtatgaatcttcactcatacttattttaccatttaagagaacgtgttaggccccaaagggggagaaaatgcaacgagggctctcaagttctccgtttttggcgattaatggcaaaggtggagaaaatattaagcccaaagcaaaaggaccgcaccaccatttaaaaaaaattcaaaataaatttcacgggtcactagcaaagtctaggtaaaagtagtatagaggcttccatgcatcactatatgatggtgcaccatcacattgccattctcatgaacaccttctttgtgacatgtcatatgtttggttgtatagctagagacatgcaactatttcatacgatctttaaggggcatcatttgaagtacgttatgtggaaccttggtcatcacatcctcatcatcatcattcacaacctcaatgtacctcaatttgccacacactttacacttctcctctttctcattacctttctataaaagcatataaccatctttatacacatcaaccttctcatatggcatgcttctttgaatggtatatgtctttgggcatcttgtgattttccagaaggatatcgctgatcaaatttataagctccttataacatttacttgagaatgcaaacttggactttatagccataagtcgggtcacaaaggcgagggtggacacaattgtgtgttcgtgtattggctcttttgaagctctaaggagctacaagaaccttttaacctcctcggtcattgaatcctctaaatttgggtcatgctatgagagtacatcattaaccaccttttccatcctatcatcatcaattgtatcatcatctatctcttgtgttgttgcttgtgttgtcacttgtgtctcatgctgatgttgtgaattatcatggtgtcaccacatctcgtatcttcatatgaaaccataggtacaaaggtggagtgttatcattctttagtccttgcatttatagttgtggcaatttgtacatgggcataacacatcagtacccgttgtggtttcttacaaactaaagccacacccaacaaattcctaagttcttcaccatctaatcatgagagtgagatccaatcttattttaaccataatacatccatcgacgatcctcactcataatgtaaagggtagagagcatgtgttaccttgtcagcagaaggttgaagatggcccaacaacaccgcagtggcgcagatcaggtggtggcgaggtcgacaacagcgcacatacgccagtgtcctgtgggaaggcgtggcatggtggggtagccacgatagtggtggtgtgcggcaggtgtggaatgcaataatagactgggcgcgaggagggcaatgcatggctacacaacgtgacatgatggtgtgacggtgagaggctgcgcaaccgtagggggcatgcagcatggggcagcggcgtaatcacgatgtgcggcgtgagaagagcagcatgtggcgatgagatatgcgagcaagacggacgcggctagcgggcgcaactcatcgagccttgtggctaggctggatgggtttattccactaagagcaactccagtagttctctaaaagacttcctaaatcaataatttaggtagttaacataaaaactattctccaacagttctctaaatgaactttctaaatttaacaacttgtcatctaacctcattttctctctacatttggcaatcatttaacaactccctaaacaaaaatattgactgcattatgtagtttttgtgacttatttttttatgtggatagatacaaaacaaaattacaacctatatttagagaactattggagaactcacatttttttactccaaaagtcatttagcaacttcttaaatctacgatttagagagctaaaatttacacaactattggagttgctctaactttcgttgactactgacacaacctatggaagtaatttgtggctttcatggttttgttagtaggtaacaaaaataattaattttcatcagtaatcgacacggtcgacaaaaattatgaataacttttatcggttgaacgacgaccgacagaaactatttaattactgtcgactaccctaaatatcgacaataattaacggggccaacgattttttagttttcatgtgttgtataaagatggtcatgcgttgttgtcgttgccaaaagggttaggaataaaaaaacagttcagttgggttatttttaaaatcgtatgtataaatagtaaatggagaatggctatattcaaccatggaatctcttcccaagttggaggctcgaggtgaatcttggagattcccttccattgttttcaaggacaggaaagtaattgttctttttatgacaatttttataggatctttatatataacagatctatgcttctaatgctatcagtcttgttttttgcccttcgtgttcaccaagtgccactattgtttatggctcaattaagaaatgtgttggcggctaaagtggctcttcaattgtactttgggccgtcatttggagcagacaaagctgcatgcaaggcaaaatggcagagatgttgttgttgcattgcattggacctgaatgcgtccaactacaaagggaatgaatatacgtgctgatcaaatggttgctccggtcagattgttagtactagtgcacaagcaagctagtgcggcggctgattccttgcatgtgaaaaagctttttgtcgtcatgcatggtagtagttactcgtatggttctttaattacgcttaggactgtacttggaccggttaaattagattattattagttctgtgaccgagatctgattgccatgaactgtacttgactgtttaatttaactaaaaaatatactatctgatattttcatttctctagatagtcatggagtatatctgtatatgtatatattaaaaataatgtatcttaaagagttaaagcgttttattatttagaagaaaaaaatatttatcatcatcatatattgttgattcaaccgtgtgatcgggacagattcagcctaggcgctaggggtgcttgagcaattaatgagcacccctaccctcatgttgttcatatagaactttcatgaagaatcccttgaaattctaactatagatgaaaaaaagataaaaacgacaagaaaaaagagaaaggaatgaactctctcatgatcctggattggtccctgatcattgacagtgatgactgatatgaatacctatactttgacggcgaccattggcctacgatctgtatctcctgcacaccgtcacctttacacgcatgcaatggtcttgtggcacaactttcgagatggaatattcctactgtgcatagctaccatacacacacacgcttgtgcaaggttgattcctctgcaggcagtactcgtgtccccctcctgctgattctcgacttgcactagacaaatgcatccatatttatattagtaggcaatcaaacttggaatattcacgagaattaatataagaaattaatcttttccgctttgtggtacaataatgtataaattagtagagttttcagtaaggtacagtagtaggccaaacatatgtacgtcagtacgtgtagtacttgactctacatgatgtacaacattatcactatcgaacacgactactttgtcgtcgagtgtttcagacactcggcaaagctcagaaaacactcgataaactctttgccgagtgtgactttcagtaaagagatctaggtgaattatatatcggcaacgacttctttgtcgaatattttttgtcggacattcggtaaatgttttaccaagtgtcacctgttactcggcaaataaaagtcgctgtcacggcgccaagtgacgatgacgaagcctttgccgagtgtcctccctgacactcagcaaaggctccctctttgccgagtgcctgctggactagcgctcgacaaagaaggctctaacgggtccctttgcgagttcctttgccaagtgcttcgggagccactcaaagggagctttttcttgctgacggcgctttgctgagagccctttttacactctctgcaaagaagtatccttttatgctgagagtttggctctcggccggcagaaactctcttcgcctagtgactttctacaccaagtgtagtatttggcaaagtatgttttgccgagtgcccgataaataactcttgacaaagagctagacactcgacaaagagtcgaatttcagtagtgtatgtaacatttaggacgtgcacttctttttaaaattttgtgacaaacactcctttttttacatgagcgtttgtaaagtacttcctcttttaaattataagacgatttgattctctctctctttatatatatatatatatatatatatatatatatatatatatatatatatatagtcgaggtcttccaatagttacaccaaacctcagccacccgctggaccgtgcctaacacctaggcgcatgcggtaggttgcgtcccaacgcgcatcagtcaaacctccggtccaacacctaccctccagcgtgggacacacacataaattgtggttctgttttttcgcaaatagcgtaaatagttcacagaaaaaacgtaaatagttcataaagatagcataaaaaccccacatagccactagaccacgtccacacgcctaggtgcatgcatgcagatcctattcttatggtagatccgataattatagcaggtcatgggaatttcccttacatgcacgcaaaaatttcatggctccataaatataggatcgctccaactgtcatgcagctaggctcattaaaactagttttatgatatatacttgtcggggaccataattaggggtaccctcaaggctcctaattctcagctggtaacccccatcagcataaagctgcaaaggcctgatgggtgcgattaagtcaggaatcggtccatacgagggactcgatcacgcctcgcccgagcctggcctcggacaagggcagccgaccccggaggatctccgtctcgcccgaggcccccctccagcgacgaacgtgttcccggctcgcccaaggccctgtcttcgccaagaagcaaccctgaccaaatcgccgcgccgaccgaccaagccgcaggagcatttaatgcaaaggtggcctggcacctttatcctgacgcgcgccccccagccgacagagccgaagtgactgccgtcacttcgccgctccactgaccggcctgacaggaagacagcgccgcctgcgccgctccgactgcggtgccactcgacagagtgaggctgacaggcagtcaggcccggtcgaaggcaccataggaaactccgctccgcccgatccagggctcggactcgggctaagtcccggaagacggcgaactccgctccgcccgacccagggctcggactcgggctaagtcccagaagacggcgaactccgcccgacccagggctcggactcgggctaaagtcccagaagacggtgaactccgctccgcccgacccagggctcggactcaggctaaagtcccggaagacggtgaactccgctccgcacgacccagggctcggactcgggctcagccctagaagacgacgaactccgcgccgcccgacccagggctcggacttgggctcagccccagaagacgacgaactccgctccgcccgacccagggctcggactcgggctaaagtcccggaagacgacgaactccgctccgcccaacctagggcttggactcgggctaaagtcccggaagacggcgaactccgctccgcccgacccagggctcggactcgggctcagccccagaagacgacgaactccgcgccgcccgacccagggctcggacttgggctcagccccagaagacgacgaactccgctccgcccgaccccagggctcggactacgccccgacctcagccgacggtctccgcctcgcccgacccaggggctcggactcgacctcggccacggaagacagactcgacctcggcttcggaggagcttccacatcgcccaacctagggcgcagaccagccacgtcaacaggaggcgccatcatcaccctgccccgagctgactcgggccacagggaacaagaccggcgtcccatctggctcgctccgccagataggcaatgatggcgccccgcatactctgtgacgacggcggctctcagcccccttacggaagcaagaggacgtcagcaaggactcaaccgctccgccagctgtccctccgtcaggctccagcactcctccgacggccacgacatcacaccagcagggtgtcaaaatctctccggctgccacgacgacatgtacttagggcgctagctctcctccgctacacacgtagcactctgctataccccccgttgtacacctgggtcctctccttacgcctataaaaggaaggaccagggccctcttagagagggttggccgtgcggggacgaggacgagacacgcgctcgcttgaagccgctcgctccctctcccgcgtggatgcttgtaaccccctactgcaagcgcacccgacctgggcgcgggacgaacacgaaggtcgcgggattcccacctctctcacgccggtctccggccgcctcgctctccccccttcgcgctcgccctcgcgctcgacccatctgggctggggcacgcggcaacattcactcgtcggctcagggaccccccggtctcggaacgctgacagttggcgcgccaggtaggggcctgctgcgtgttgacgaacagcttcccgtcaagctccagatgggcagtctccagcaacctctccaacccgggacgttgctccgtttcgggagtcttgagttcatgtccctcgacggcagctacgacatgatactccttccaccgccgtgcgacaacgacaatggcgaccgacagcctgcccgccggcggcggaatcgacaacgtcttccccgcgtgatggaagaacaacgttcgagctcaccccgtcctctcccctgctgacggaggaggaggcggggcaaccaaggccaagcaggaggcagcgcctcgtcggctgtcgagcgagtcgacgaccccagcgccccaacggggggcgcaccgggcgtcgacctcgcgtttgagacgaaggcgagcgccgtctccccgcgacacgccaatcctgagcaagcggacgacgccagcacgctcgcgaaaagcttgctggacgtcacccttgtacctgagacgacgacgcagtcagtccccgacgtgacctcatcgccgcccgtcgaccaaaaggtaccgaccgattcccatcccacgtctttcggattcagcctcgacccgcctagcggcttcgctttggtgggcgctctcgtagaggcgagtccaaacccactggggtttcgtatgcggtcaccttgggaccggctgacggacgtcttgacctacgggccctctgggtccgaggaagacgacgagcctagcatctgttgggatttctctggacttggcaaccccagtgccatgcgggacttcatgaccgcatgcgactactgcctttccgactgttccgacggtagccgtagcctcgacgacgaggactgcggcccaagtcgcgaatgcttccacgtcgatctggggggtccctccgaaggcaaccatctcggcatgccggaggacggtgatctccctaggccggtgcctcgcgttgacatcccacgggagctagctgtggtccccgttcaggcggggggccatgacccacagctggagcaaatccgcggggtacaggctaggctcgacgagggagcaggagcgcttgagccgatccgtcgggacgtcgggcaggcatgggtgggccaacctccagccggagaaatacgtcatctgccccagggcctccagcaccgcatcgccgacgacgtcaggttcaggccgccacccgcatctagtggggtcggccagaacctggctgcagcagcaatgcttctccgcacgatgccggagccatcaaccaccgaggggcggcgaatccagggagagctcaagaatctcttggaaggcgccgcggtccgacgggccgagagctctgcctcccgaaggcaggggtacccctcggaacctcatgccgcgacttcccgattcatgcgggaagcctcggtctacaccgggcgcacgcgcaacaccgcgcctgcggccccgggtcgcctcggcaacgagcaccatcaccgcgaccgtcgggcccacctcgacgagagggtgcgccgaggctaccaccccaggcgtgggggacgctacgacaacggggaggatcggagtccctcgcccgagccacccggtccgcaggccttcagccgagccatacgacgggcgccgttcccgaccctgttccgaccccccgactactatcacaaagtactcgggggaaacgagaccggaactgtggctcgcggactaccgcctggcctgccaattgggtggaacggacgatgacaacctcatcatccgcaacctccccctgttcctctccgacaccgctcgcgcctggttggagcacttgcctccggggcagatctccaactgggacgacctagtccaagctttcgccggcaatttccagggcacgtatgtgcgcccgggaattcctgggacctccgaagctgccgacagcagccgggagagtctctccgggactatatccggcgattctcgaagcagcgcaccgagctgcccaacatcaccgactcggatgtcatcggcgcgttcctcgctggcaccacctgccgcgacctggtgagcaagctgggtcgcaagacccccaccagggcgagcgagctgatggacatcgccaccaagttcgcctccggccaggaggcggtcgaggctatcttccaaaaggacaagcagccccagggccgccgatcgaaagatactcccgaggcgtcaactcagcgcggcgccaagaagaagggcaagaagaagtcgcaagcgaaacgcgacgccgccgacgcggaccttgtcgccgtcgtcgagtacaagaaccctcggaagccccccggaggtgccaatctcttcgacaagatgctcaaggagccgtgcccctatcaccaggggcccgtcaagcacacccttgaggagtgcgtcatgcttcggcgccacttccatagggccgggccacccgcggagggtggcaaggcccgcgacgacgacaataaggaagatcaccagaaaggagagttccccgaggtccgcgactgcttcatgatctatggtgggcaagcggcgaacgcctcggctcggcaccgcaagcaggagcgccgggaggtctgctcggtgaaggtggcggcgccagtctatctggactggtccgacaagcccatcaccttcgaccgagacgatcaccccgaccatgtgccgagcccggggaaatacccgctcgtcgtcgaccccgtcatcggcgacgtcaggctcaccaaggtcctcatggatggaggcagcagcctcaacatcatctacgccgagaccctcgggctcctgcgtgtcgatctgtcctccgtacgagcaggcgctgcgtccttccatgggatcattcccgggaagcgcgtccagcccctcggacaactcgaccttcccgtctgcttcggaacaccctccaacttccgaagggagaccctgacgttcgaggtggtcgggttccgagtaacctaccacgcggtactgggaagaccatgctacgcaaagttcatggccgtccccaactacacctacctgaagctcaagatgccgggccccaacggggtcatcaccgtcggccccacgtacaaacacgcgttcgaatgcgacgtggagtgcgtggagtacgccgaggccctcgccgagtctgaggccctcatcgccgacctagagagcctctcgaaggaggtgccagacgtgaagcatcatgccggcaactttgagccagcggagacggttaagtccgtcccccttgaccccagcggcgacgcctccaagcagatccggatcggctccgggctcgatcccaaataggaagcagtgctcgtcgactttctccacgcgaacgtcgacatcttcgcgtggagtccctcggacatgcccggcataccgagggatgtcgccgagcactcgctggacatccgagccggagcccgatccgtcaagcagcctctgcgccgattcgacgaggagaagcgcagagccataggcgaggagatccacaagctaatggcggcagggttcatcaaagaggtattccatcccgaatggcttgccaaccctgtgcttgtgagaaagaaaggggggaaatggcggatgtgtgtagactacactggtctcaacaaagcatgtccgaaggttccctaccctctgcctcgcatcgaccaaatcgtggattccactgctgggtgcgaaaccctgtctttcctcgatgcctactcagggtatcatcaaatcaggatgaaagagtccgaccagctcgcgacttctttcatcacacccttcggcatgtactgctatgtcaccatgccgttcggcttgaggaatgcgggcgcgacgtaccagcggtgcatgaaccatgtgttcggcgaacacattggccgcacggtcgaggcctacgtcgatgatattgtagtcaagacgaggaaagcctccgacctcctttccgaccttgaagtgacattccgatgtctcaaggcgaaaggggtcaagctcaatcccgagaagtgtgtcttcggggtgcctcgaggcatgctcttgggcttcatcgtctccgagcggggcatcgaagccaacccggagaagatcgcagccattaccagcatggggcccatcaaggacttgaaaggcgtacagagggtcatgggatgcctcgcggctctgagccgcttcatctcacgcctcggcgaaagaggtctacctctgtaccgcctcttaaggaaggccgagtgcttcacttggacccctgaggccgaggaagccctcgggaacctgaaggcgctcctcacaaaggcgcctatcttggtacccccagctgccggagaagccctcttggtctatgtcgccgcgaccactcaggtggttagcgccgcgattgtggtcgagaggcaagaagaggggcatgcattgcccgttcagaggccagtctacttcgtcaacgaggtactgtccgaaaccaagatccgctacccacaagttcagaagctgctgtacgcggtgatcctaacgcggcggaagctgcgacactacttcgagtctcatccggtaactgtggtgtcatccttccccctgggggagatcatccagtgccaagaggcctcaggtaggattgcaaagtgggcggtggaaatcatgggcgagacaatctcgttcgctcctcggaaggccatcaagtcccaggtcttggcggacttcgtagctgaatgggtcgacacccagctaccgacggctccgatccaaccggagctctggaccatgttcttcgacgggtcgctgatgaagacaggagctggcgcaggcctactcttcatctcgccccttgggaagcacatacgctatgtgctacgcctccatttcccggcatccaacaatgtggctgagtacgaagctctggtcaacgggttgcggatcgccatcgagctaggggtccgacgcctcgacgctcgcggtgactcgcagctcgtcatcgaccaagtcatgaagaactcccactgccgcgacccgaagatggaggcctactgcgatgaggttcggcgcctggaagacaagttctacaggctcgagctcaaccacatcgctcggcgctacaacgagactgcggacgagctggctaaaatagcctcggggcgaacgacggttccctcggacgtcttctcccgggatctgcatcaaccctccgtcaagatcgacgacacgcccgagcccgaggcaccctcggcccagcccgaggcaccctcggctcggcccgaggcatcctcggttcagcccgaggtaccctcggcccccgagggcgagatgctgcacgtcgagggggagcaaggcggggtcacgcctgatcaaaactggcagaccctgtacctgcaatatctccaccgaggagagctacccctcggccgagccgaggctcggcgggtggcgcggcgcgccaagtcgttcgtcttgctgggtgatgagaaggagctctaccaccgcagcccctctggcatcctccagcgatgcatctccatcgccgaaggtcaggaactcctgcgagagatacactcgggggcttgcggccatcacgcagcgcctcgagcccttgtcgggaatgctttccgacaaggcttctactggccgacggcggtggccgacgccactagaattgtccgcacctgcgaagggtgtcagttctacgcaaggcagacccacctgcccgctcaggctctgcagacgatacccatcacctggcctttcgctgtgtggggtctggatctcgtcggccccttgcagaaggcacctgggggctacacgcacctgctggtcaccatcgacaaattctccaagtggatcgaggtccgacccctgaacagcatcaggtccgagcaggcggtggcgtcactagtaagaatgtgatcatcagtgacgattttctagtgacgctggtgacttcagtcacagattgatacatttctatgaccaaattgacatcttcgtcaacaattacaagggacgaagattagacttgaatattaaagacgaaaatgaaaggaacgtcatagatgaaaatgaaaggaacgtcatagattaatttggcttgatcggctgacgtaatgatgaaataaattggtcacagatgagttttagtaaaaaacggcccacgtgtacacaccacttgacggcgtgggatccttggcctacatgggccgcagttttttgggacacagcccccacctggcgacgcggacccggcccagtacgaagcggtagttagttatttggcaaaaaaaggtgcgcccgcggagcttcgaaccagggacctgcgacttgcgttaaattgttgctaccaccagactacgcacttgttcgtgtacataaagaaactatccgtctgttaacaggtgttcccatatgtcgttatgttaacaggttttcccagccgccattctgcgatctgcatggttcgcctgttctgattttttcctgctgcgatctgcgcttctgcgatcggccgtcaggttacggcacacaacgatgccggcgtctgtcgtcgtccgcttgatcggcaactgggtagcgtcgcagcgaacgagcgatcttgtcgcctgatccattgatccaactgtgttggaagaacggcgtcgtctgcaaacagcgaggcagagaagcttcgggcgcggcaaagcagcggcgtcttgcgcatagctacggcaggcgtggatagaacagcggcagggcggggagaaaagacaaggtttgatgtgctgtgtttttgacaataaggttctatgtgcgtttgaattttatttcatatatgcatgtgtttgatgtggttttcaattttgttcagtgtaatcatagttatggagttaatgcgagttttaatttattgtcaaaatagatggatagaagatgggtttatgggaaacaattcacacctgcatatgtgaaaggagttgaagagttcatgaattttgttactgaaagatacccagaagacacagacattcgttgtccgtgcgtgaattgtcttaatcaaaggttgcgacctcagagtgaagtagaaactcatatacacatttatggaatgtcagctacatacacgaggtggattcatcatggggagtcggcagatacagaagttgagggtatagaggaggatgtcgaaggatatgataatgactttgggatacatatggatgtggacgatcatgtttacgatgatgatcatggagtacctgagatgatcggtgaactgtttgcagcggcagaggctgatggagaagaaccaagatttgcaggagttcttggagattcaaagaaggcacttagtctgggttctagccattcaaaattttcttttatggtgaggatgttgtatatgaagtctcgttatcgaatcagcaatacagcattttcagcaatgatgaagctgatgtccgatggataccctaacagtgagttgccaaaatcatataatgaggccatgaaatatcttaaagaattgggccttggatacgaaaacatccatgtgtgcaagaacaattgtgtgttgtttcggaatgttaatgctaaattgaatgagtgcctagtatgcacggagtctagatggaaagatgaaactggttcgaagcgggttccacataaggttttgaggcattttccactgttgccaaggttgaaaagaatttttgcttcaaaacaaacttcagaggaaacacaatggcacaagaaagtgaggaagccagtcgccaatgtgatgagccatccagctgatggggaagcgtggaaggactttgaccgaaagtacccaggttttgcaaatgatctgaggaacctgaggctagccttagctaccgatggattcaatccatttggcaacatgagtacccagtacagtatgtggccagtgcttgtgacaccgcttaatctcccaccatgggaatgcgtgaatccaacaaactgctttatgtctttactcatcccaggtccaagatgtccaggaaaggattttgatttgttccttgagcccctaattgaagaactgctgaagctatggaagggtgtcaagacctatgatgcatgtactggtaggaagttcgaccttcgtgctgctgtactatggtgtatacatgattatccagcgctggccacgttatccgggcgaacaacaaaagggtattatgcatgtatttattgcgacaagaatctgttgtctatggcaataaggaacaagttatgctacattggacatcgtcgttaccttaaaaggacacattcatggcggaatagcttggatttcaatgttaagcgtgaaaacaaagttgtgcctggcaggttcactgtggatgaggtcctacaagagctagagaaggtgaaagatgtcaggccagggaagcaggctgacattactggaaataaaaggaagcgtagtagtgacggtccaaagatttatagccggaaatctgggttgtggcaattgccatattggaaagatttgatgcttccacataatctcgatgtgatgcacatagagaaaaatgtatgtgaaaatattctttgcacactacttagtataccaggcaagtccaaggacacacataatgcaaggctagatttgtatgatatgggcataagacctgaactgcacttgcaataagatggcaactcggcctgcagggctccacctgctccatatgtgttggggaaggatcagaaagtcgagttttgcaagttcctcaaaggtatcaagtttcctgatggatttgcggataacctagcaagatacataagtgaagatggttcaaaggtggttggaaaactgaaaacacattcttgccacatactcctacagagaatcatagccgctggccttagaggactggtgaggaaggatgtatatgaagcaattgcagagctggggaccttcttcagggaactatgtagtagaaatctacggatagatgttgtgcaacggctaaaaggagatattccattgatcctatgcaagcttgagaaaatctttccacctgccttctttgatgtcatggtgcacttgagtgtccatcttcccgatgaggcaatgcttagaggacctgttcagtatggatggatgtacccaatagaaaggcgactaggcactttgaaaatttttgtaaggaacagggctaggccggaaggatcaattgctgaggcatatatggcaagtgataccttaacattttgttctaggtacatgaaggatgttgacactagatttaacaaggatgatgatagtggtacagagatgccattgcctaatgacatgtctgtttttaagcatggtgctactcttgttggagctactaagactgagtacattgatgatgctatcatgaataagttagtttggtatgtgctacataatgctgatgaagtataggaatatttgacgtaagttagtttggtatgtgctacataatttatgttatgtttattaaatttgaaaatatgcttatgaataaagtatgccatgcagtctgtacagggaggagctatcgcagcaaggtgcacgtccaaatgatgttgatcgaatggttcaacaaggatttgcaaagtggtttatgtcccatgtaagtcactaaacttttatgttataggtttactaaagttttgggtatgcatatgtaattgctcagctgagtaattttgttgcaacaggttgagaagaagtgtaatgagaatccagaattggttagcgaaggactgtgggcactgtcatgtggcccagctcggcgagttaagactagtacagcttgcaagattaatggagtgcggtttagcacagtggatcgtgagaagttcatgcagacacaaaatagtggtgtaatgactgaaggtgaacataacggggagaatatagatttttatggtgtccttaaagaggtaattgagttacaatataactcgaattatcaagttcgtcggtcggtggttgtatttcgatgcgattggtacaaccaagtaggaaagactgtgggcattcgagatgacagccatttcaaatccatcaatgtgcagtcattttggtacaagtccgatccttttatcttggcagaccaagcgaaaaagatattttacctgcaagacacaactccacaatgtaaagatttccgagttgtgcagaaatttgaacataggaatatttatgatgtggctgaaaaatatgagggcagtaatgatgtgcatcaggatgattattgttctgatacagagcatatagtgcaagaaggtgatgataatcaggttctgcacaatgttgaaggtggagaagccagtctaattgaaggcaatttagaggaactaataagaaaaaagaaggaagctgctattattcttgaagatagtgaggatgaggaggaagatgatacaatgtttcaatattttaatgatggtggtgacggcaacaatgatgacatgtccatagaagatgaagatgaagatttctagtattgatagttgatttatgaattgttcagttcagattagtacaacatactgaatgtgtgtctgaaattcagttcatgtttagatgatacaatgtattttctgtattttcagaactgaatgtgtgtctgaaatactgaatttggggtgaactgaacttgtggtgaactgaatgtgtattctgtattttctgtattttcagaactgaacatttgaacacttaatatcagagaaaagattgcatggttattactgatactgctaaagagagacataaagtggtaacagactaacagtaatggcaatatggtatagctacctcgggtaacagactaacagtaatggtatggcaatatggcaatatggcaacagactaaagtggtaacagactaacagtaatggtatggcaatatggcaatatggtatagagagacataaagtggtaacagactaaaagattgcatggttattactgaacacttaacatcctgcagaaggcttgatttatatctcattacatgttagcaacatcgactggttgtagttacatattcattaaaatagataaccaacatcagatatacgcagatcaagatagcttggtctctggaagtaaacaatgtatattattaaatattattgtgctttatgaaagaatgttgaggctgctcttgacataaattatgtacctcgacatcagatatacgcagatcaagttggcgatatatgtaaaattccaaagtaaatgagggattttgaatctgcatataatgaacagcgtttaaaagtggaccaaactatgaaaggcaaccatttcttccgcattactgtcaacagtggctttgtatactttagcaaaagcaccagtgccagttgatcctttgatttgatactttctaccaccttgacacaaggaattgtagtggcagtttagaatctgaactttgaactttggactgggcaactttgaactttggactgagcagagtttacaatctgaactgggcagcaatctgaactgggcagcagagtttactcagaacacccagcaatctgaactgggcactttacaatctgaaaatgcagaaatctgaactgggaagtttacaatctgaactgggcattactgtcaacagttgatgcttaactatggactgggcataacaaaaaaatgcagaaatctgaactgggaagtttacaatatgaaaatgctataatttgccactgtgaacagagaacagtttatgcttacatcctggacagagaacagtttatgcttctaatgaacaaacgtgactggtccaatggtaactccttgctactgtgtgctctgttactgggtagaaaaatgcagaaatctgaactgggcgctcggttacatcctggacagagaacagtttatgcttacatataactgctctctgttactaacgaacaaacgtgactagtccaatggtaactccttgctattgtgaacccttgcgtcttgtgttcgagcttgggataggtaggtttttctggttttgtttacatttttcaatcatttttgtatttttcttttatttatttacatgtatagcaccagtttctccaaatcatttcaaccttttttggggtgttgatggaggtgtaccatgatgttttgtgccggtgcaatttttagaattagtttaactattaatgtaagtatttgttattttactaaagaataagtgctaaaaaaccttaggtggctagaaaaatctagaaacttgcatgtacacttcattttggtgtacaatgttgacaaaaaaaatgcaatttattctgacaaagtggtgacatacatcctacaaaaatgcatacagccctcatataaggctaattactaagtgagagatgttcatgcttgtgatggatctatactaccactttctccaaatcattttaaactttaatggcatgtttattgaaccaacctatgatgttgtgtgcagttatgcatttttcagacctagtttactaattactgtaattatttgttgtatttcgtaaagatatttgttacaataccataacctagctagaaaaatctaaaaacttgcatggaccattcattttggtgtacaatgttgacaaaatagtttcaactcattcggacaaagtggtgacacacatcctaagaaaggcatacatctctcatataaggctaattactaagtgagagatgttcatgcttgtgatggatctatactaccagtttctccaaatcattttaaactttaatggcatgtttattgaaccaacctatgatgttgtgtgcagttatgcatttttcagacctagtttactaattactgtaattatttgttgtatttcgtaaagatatttgttacaataccataacctagctagaaaaatctaaaaacttgcatggaccattcattatggtgtacaatgttgacaaaatagtttcaactcattcggacaaagtggtgacacacatcctaagaaaggcatacatctctcatataaggctaattactaagtgagagatgttcatgcttgtgatggatctatactaccactttctccaaaccattttaaactttaatggcatgtttattgaaccaacctatgatgttgtgtgcagttatgcatttttcagacctagtttactaattactgtaattatttgttgtatttcgtaaagatatttgttacaataccataacctagctagaaaaatctaaaaacttgcatggaccattcattttggtgtacaatgttgacaaaatagtttcaactcattcggacaaagtggtgacacacatcctaagaaaggcatacatctctcatataaggctaattactaagtgagagatgttcatgcttgtgatggatctatactaccagtttctccaaatcattttaaactttaatggcatgtttattgaaccaacctatgatgttgtgtgcagttatgcatttttcagacctagtttactaattactgtaattatttgttgtatttcgtaaagatatttgttacaataccataacctagctagaaaaatctaaaaacttgcatggaccattcattttggtgtacaatgttgacaaaatagtttcaactcattcggacaaagtggtgacacacatcctaagaaaggcatacatctctcatataaggctaattactaagtgagagatgttcatgcttgtgatggatctatactaccactttctccaaaaccattttaaactttaatggcatgtttattgaaccaacctatgatgttgtgtgcagttatgcatttttcagacctagtttactaattactgtaattatttgttgtatttcgtaaagatatttgttacaataccataacctagctagaaaaatctaaaaacttgcatggaccattcattttggtgtacaatgttgacaaaatagtttcaactcattcggacaaagtggtgacacacatcctaagaaaggcatacatctctcatataaggctaattactaagtgagagatgctattgcaagtgagagatgtatagtaccactatgtcaaaaatattttaaaatattataacatgatcataaaccaaactaatgtgtccatgaatagataattacaaaaaaacatagagataaataaaaacaaagaattaatataaaatggtaggcaaaacacaaaaaaaaagtctccttgcaggcgcttgaacctaagagctcggtcttaaagttaagaggtcaaaccattgagctatgcatgtgttttcaatatatacccagccctagtatacttaaacgcattagactccgcattgccaaacacattgggcgccaaaaacattttcgtcgtcgtcactaaaacagactccgctctcatcctctatctcccgcactcctcttatttctcccccactcttctttctcccccacttctccaaacctaatcgccgccgccgggacacgacggctgtcgacgacctgccccctcgaccaggtacctcaccgtcgcccccttacctctcatcgcgtcgatgagctgcatcgtcgccgacttcactcgccgcatcccgctctatctcattgccatccgcatttctctcgccccttccacctaacacgccccatccacattgctctcgctaacccctaaaccctaacatcgctggatttgggtcatcgcagacgaccttgatggtgaacaaaaggaggcacagaagtcagaaaggtccaacccctaaaccctaaccatcgctagatttagtttaattattcattcgttgttatcagagatattgtaaattgatttatgtaatcattatgcactgatacagttgtgtttggttccttacattgtattatatgcagtcacatccatgttttagtagagaacttatgtttctagtactggtagacaaggttcaagaaagcgcgattaggcgtgcgattaggcgcggttaagcgctaagcagagggtcaacgcatcgcttacctactaagcgggcaattaagcgctggccctgcttaatcgtgcccattcggcatgtttaagggagaagaggagggagaggaagaggaggaacacctccagggtcaatccagcaggcagcaaatcgacggatcgacgagagagagagaggcggagcggcttcgcggtagaggtgaagatcgcacgagggaggagaggcttcgggagagggagccggagagcgtacggcacggaggaggataggcttcgggagagggaggcggagagcacagggcggcggcgcgaggcgtggaaggaggcagcagagtactaggtcatcacgggagaggggttttgcgttgagcctcctggcaggtgggcctagtgggctgcagactcatgaagagaggaggtgggggttaagggctgctgcagggtggcccaatatcatgtattgttttctctttttaacaaaaatgattaagcacgattaatcacgcttaagcattttcaccaccataccgctcgctcagcgcttagtgctttcttgaatcttgctggtagaaagagatgagaatatcttcacttttttcgttcatcagcttgtgtaaatctacatcgcctaatcaatgtactagctagtactttgaacattgtttaagcctgcataaagatttccacaaccaaacaggggaaacactacagttatagtgcaaccacaattatgaacttgcacaatcataaccaagcttcataatgactgaatctacacatcttatctatttgcttttagtcaaatccttccctgcaaatagtagtacctcttagcttttagtaaaatcctttacattatctaatacacacagtatgcttgttcttatctatcttgcaagtagttcaacatgagcgaactgcttatgagagaagacgggataaacaagtggaggagaatataaagaagatgcaagatttgggtctgaacaaatatacttctgttctaaataattctgtctcaccatctgcatcaacaaaggggaaacatgcagcaaacaagataaataatagttcagattcggattcatatgtctctttctatctccttgacgatgatgatcaaggagatactgatgatgacagtgaatattatgagcagccaaaacccctggcaatgaaggtgctccttctatcttcaaagtagtggatgccaaatagttgcattgcatttcaatgtttttaatctggtgtttaatatatgctcatgcttttagattcatcttctttatttcatacctcttaattaatatatggtcttgcttttaaatgcacatgactattttttgtggacagtatcctagaagaggtagaaacacaacccttgcttcaaagaagaagatagaccccaacatggctccaggcattaggttcagcaagagagtgagggcaggtgcacaaccagaggagcaatcttcaaaaaggcttcactctacagagacagatggccacaatgtacaggaaccaacagatggaaatgatcacataccaaacagccctactacacctggacttgctgatcatttcagcagagctgcagaggaagtcatggcatctgctactcatgacagtacaggtgatgctgaaggcaacagtcgtactgcacctggacttgctgatcatttcagcagagctgaagaggaagacatggcatctgctgctcatgacagtacaggtgatgctcaagccaatgtagctagagatgaagaaactgaaggcaagttctattttttcagtcaaataaggcatctcttttgctgatttgcatgaaacaaaacaatttcattattcaataaaagtgaattatattttgtagctcctacatagcgagcaccaaggagacccagggcagcaaccaagggaaaacaactggacatgatgactaaagttatgcaaaggagactgcccatagctgttgaggaaggcaaaaaaaggccacatgaacctgttcaagctgccaagtttgcatcagaggctggcatcattattcgggaaaccatgcctatcctaactcgttggaaagattacaaggacgaccagaaatactacaacagctttgtgtcacagctaaatgtaagtgcattactgattctatggttcacttgtatactgcttaacctgaattgactaactatggaattgtcatatgcataggggcgcttgtccgttaacactgaggacaaggcaacaaaggaagcttgcaccgatatgctacgctctgcggtaaaaaaccagcgttatcggctcaagcagaaatacttcaatggtgtacctgcaaatgagattagcacaacttctcctgtatcttacatgactgatgaacagtggagggcattagttgcaaagtggtctgatccaaagaacatggtatgggtatcttgtcatatattgttctttcactatacgtttgcaaaggatcttcgcatattgaacctatgatctaatctgacatgttcattctcttgtagcaaataagtgaaaagaacaagcagaaccgcagtcaagtcaagtttcatcaggctacgggttctcgctgctatgtggcacacttacatgcatatgtaagtaactattaccttatactactacctgcacttttgcactcaacttctattgcatttgatctgagcaaacttcgctgtgattgtttatccacgaaacagaagcagaagagaaaccgagaagaacccagcttagatcagactgaagaactagatgcggtggacgccttcaagacctgtcataccagctccaaacgtggcctgagtgaaccggcaagagaagcacttgtaagttcatttgtttgctttatttagtgtaattgttatgagatcatatgagggaggttggctgtgggtcgatggaacgaaggggagtgagatcgatgagtgagatcgcctgtcccatcccaggggagttcagatcatagtctattttgtctgccatttgtctgccatcaaatttctgaaatgaaagtaaatatcatagtctattttttgtaggacccgtgcactagaaatgtataggttttagagtctttgttaagcaaatctgctataatttgtaactgttttcacattatttttcatagtctatttatagagtctttcaaatgtatagcttttaatttgccatcaaatgtatagcttttaagcaaatctgctataatttgtaactgctataatctgctataatttgccatcaaatgtatagcttttagagtctgtcagtctatttttcatagtctttgttaatgccttgtaggctataatttgtaactgctataatctgctataatgtgcactagaaatgaaagtcactgttttcacattattgtcagcatcttgctgttgctcattagcattaacatgttactgtttctgtccatgatatttcagtctcatatggaggctttgagggctgaacctattgctgaaggtgagatgccagcatccagtgtgcaccttgtgtcgaaggtgttgtcccagagcagctcacaccaattcctgaaaagcgtcggcatcaaaacatcggcaacctccaaggcatcatcatcaaatcatagtgagcttcgggaacaacttgcagctgaagcgacgactgtcgttcaaggtgaactcgaccagctcaggaagaaatgtgaagaagctgaggaacagcaggcgaggacacaaagggagttggaggagtacaagaagataacagagaagaacaacaaggagatggaggagaccaatgtgctcatcaagaagctcttgtccttgcatggtaactcttcttcgacatgagggctgctagtcagagctgctgtttttggcctgttctttgacatgagggtacccaaaaactctagttgctcgtgggtgtcaacttttgattatatgctgttatgtttgtgcaaactcaactgaaatgtgaagtcaagtggtgatgctgtgaactgagtttagtgttgtccacttagtttgtatgcgcactggaatactagttgtattcatctatggaatatggaattgtgtgctcattcctctgttctagtatattttgcaatttccaattaaattattctctgcacatctgtgaccaaactggtggcatataataaaacatatgccacgtcagctgccactgtactagccacgtcagcgttgacgtcagctgccacgtcactagccacgtcagcactgacgtcatacgcatcagcaccttccaaatggctgttaatgaccaaacaacggctctatctgtgacgataccgtaccatcacagaaaccaaccgtcgcagacgacgaattatgacggaaaagtgccttcctctatgaccacaactgatcgtcatagaatgaattcacttccatgacaacgcggctttcgtcacagaatgtatacacatcgatgacgaaactgggtagtccatcacaacacaacaaatgtgacacgacccctatgaccaaatcgaactcgtcacaaattcgtcacaaacctttatctgtgacgatatatacacatgcagtgatgcaatacgaacgtcatcgatgataagatctctactagtgcgttcttcaccaacatcatccatcgcttcggggtcccgaactccatcatcaccgacaacggcacctagttcaccgacagaaagttcctggacttctgcgaggatcaccacatccgggtggactgggccgccgtggctcatcccatgacgaatgggcaggtagagcgtgccaacggcatgattctacaagggcttaagccttggatctacaacgacctcaacaagttcggcaagcggtggatgaaggaactcccctcggtggtctggagtctgaggacgacgccgagccgagccacgggcttcacgccgttctttctagtctatggggccgaagccatcttgcccacagacttagaatacggttccccgaggacgagggcctacaccgaccaaagcaaccaagctagccgagaagactcgctggaccagctggaggaggctcgggacaaggccttactacactcggcgcggtaccagcagtccctgcgacgctaccacgcccgaggggtccggtctcgagacctccaggtgggcgacctggtgcttcggctgcgacaagacgcccgagggcggcacaagctcacgcccccctgggaggggccgttcgtcatcgccaaaattctgaagcctggaacgtacaagctggccaacagtcaaggcgaggtctacagcaacgcttggaacatccaacatctacgtcgcttctacccttaagatgttttcaagttgttcatatacctcgcacccacgcaaagtttagtcgtcaaggaagggtcggcctcgccccggcaaagcccgaccctccctcgggggctaaaaggggggggaaccccctctgcgtcgaaattttcctcgaaaaaatatcttttctgccagaatgtctttcgtgctttttggctacttcgaaagcggaccctgaaaacgacggagtacacgtaagcagccaaggctgaccgagccgagggactcctacgcctccgggatacggatacctcactcatcaccttctgcgataagtaactcgcgttcggataagtgattccgcggaccgaacaagtcttctcgtttggaagctcttctgccggagcgattcttcgagccttcccgactgcgtcggtaacagaaccccaaggacgggtaagagtgcgcgtaagcggcaaggctgaccgagccgagggactcctacgcctctgggatacggatacctcactcatcaccttccgcgagaagcaactctcgctcgcacaaacatttctgttaccaacaaaaagtccagatactcgaagcaagaggaaaagagacgcagctttacaacacgacgagggtgtgttttggcctcggcggccgcaggaaacacacgctacaagacaatccgatcctgcaggctcgggtcttaacgctggaagggagcagcagcaccctcggcatcgacaacgccttcggcgaggtccgacttagcctcggacggcgacgcggtccgaggatctccactctgaaggatgacgtcatcgccacgcccgggccatcgctgccagggtcttctcgggaatccggcccgagcaggcggctcggccggtcaccccggggcctcggccagctgtcctccaaggacgtcagcccgaccgaggcctcggctggtcaatttcggcgtcggtcccgctaacggacgacccggccaggctccggccaaccaggttttcttttcgagccaactctgcctctgttcatgttgacaccgctacccctggcctcggctcatcggagagcggccgaggggttcctttaaccaagctagagaagcctcgggcaacaaggccgaccgagccgagggactcctacgcctccgggatacggatacctcactcgtcacctttacacggggcgactcacgcttggtgaagcggtttagacaaccaacaggtgagtcttagtgctcaaaaatgaggaaaaaacacggctccgtgccgaaaaatacatacatgttcaggccccgacagccacaatgaacaaaaacactggcattcaaagtgccattacaaacggaactccgattccacctccgcaggtacgaaaaaccccactcgacgggggggggcctgcggagcaacggaagaccgacgaacggcgcgacgtcgcccgctccggcagcggcgacgacgacgacttctgctccggggggccgaacagcggcagcgatgacctcagggcggatgccgctgccaggaggcccccgcccgtgcccaaactcgtgaggcaaggacgggcagaaggccgtagagttggaggtcggctcgtgggcggccctggctatctcgtcggcggaagaacctcttccagctaccgtggcggaagccggcgccgagagcggctccgaagccactcgggtccgagagccaggcacgctgcagctaccggcgccacggacgacaaccgtccttccccccgatcactgagggaaggagcgggccatcgcccacgtgggggctgaccccaactcggcacactcccctccccagccctggtgatgaaaatccttgaggctgagggaggggcagaggccgcagcccggctcgctttcctccaccatcaaactggaggtcaccgtcttgggtgaccgccggcggggggtgcagccgggctgcatgatgaaaatccttgaagccgaacgatggcagaaaggtaccaactcccacggagttgcgttcctccaacgatgaggcggaaagacggtggatatcccccatccgggggcttggaaggtggaaagacacgatgcataagggagcgcgaagacgtggtcgccttctaagggggtcaccctccttttaaaggcgactctccctgcttgcgtccccagccgtcgcgggctgagtcttctccaacacgctccaaggtcctccccctatggcgcgggggctgggtcccacacgtcatgcaagccgactcagagcagaagaagccaaaccgccgtgcgcggtgcgtacaaccacccagtggttacaagcgactctccgcttttgcccagacccacgggcgaaaggggcgggcagccatgcaggcggcatgcaaccgcgccaagtgggcgcacttctccgactcccaacacgcccagcatggaggcccaggcccacgcgtcatgcaaccggcgcgccgaatgcttcgtgcatgcaacagcaccgccacttgcgccactaccgcgcctcctcgactgcggaaccaataccgcgactcgaggcgacccagcgcacgacccagcagcgccagcctggcgcggcggtcaatgcggccaaaaatgggccggcagtaatggcgatggcaggcgggcaggagcagcggccacgtcgtcagccaagctcacatcccgtccgggggcagcgagagaacccactctcacggcgtgaagacaatgcgcccgtgatccattcctcgaacggctcgcgcacgtgcaacggccgccccgccaaccactcgccccgtcgcattaactccgcggcgggacaggcggcgcctctggcaggagaagcgggcgacgcttcgccttcgccataatgaccgcgtcaaaaaaggtacgccgcgtcgttcgatttcatatccttttccttttttcctctttctctctcttgcaacagggaccgagaaagggggataccccgaaaaggatccttccccgtgaaggaaccaggctccgagcctccctactgatcagaggttcgaaggctggcccctcggaagggttcgacagccgcctcagatcgcgtgggctctacacccactactggtcagaggttcgaaggccggcccctcggaagggttcaacggccgcctcaggctactcgggctccgcgcccactactgatcaggggttcgaaggctggcccccgaagggttcacagccgcctcagacgccgagcgagggatgaccatgggtacgttcgatacataaccaaggctcgggctgcgctcccgaggtaccctaggacatttccgagaccagcgggaacggtcttgtaacggaatcccatcagagggaggcatcgagccctcggaccccgtcgccaggggaccgggtccggcagatcacccgcaggtacttttgggcgtgcctctgggcccctagccgacccctaacgaacggggcacggacgtccactcggattacccgcttgcagctcaccagagacaccatgttcggcgcccatcgagggcaacatggcgctttcccccctcctccttgcggaaaggcgacgcaggggcgtatgtaaaaaagccgagtgtgtccctgatcgccctctcgccctgtgcagaggctcgggggctgctctcgcaaacccggctccggtcgaaccgttgacagcatcaacataccagcccgagaacttgggaaccgaccgtacacccgggctatagccagctcgcatgagggaacaaccagaccagccgaagcattacgcgaggcattaagacctcggaggagtgaaaccactcctccgaggcctcgggggctacacccggcgggtgcgctcgcgcgcacccaccggtacaaaacgcaaccgagaaaggctggtccccttgcaaaaaagtgcgacaaaagcctccaagcgagtgctaacactccctttgaggctcgggggctactgtcggggaccataattaggggtaccctcaaggctcctaattctcagctagtaacccccatcagcataaaactgcaaaggcctgatgggtgcgattaagtcaggaatcggtccatacgagggactcgatcacgcctcgcccgagcctggcctcggacaagggcagccgacctcggaggatctccgtctcacccgaggcccccctccagcggcgaacgtgttcccagctcgcccgaggccctgtctttgccaagaagcaaccctgaccaaatcgccgcgccgaccgaccaagccgcaggagcatttaatgcaaaggtggcctgacacctttatcctgacgcacgcctcccagccgacagagccgaagtgactgccgtcacttcgccgctccactgaccggcctgacaggaagacagcgccgcctgcgccgctccgactgcggtgccactcgacagagtgaggctgacaggcagtcaggcccggtcaaaggcaccataggaaactccgctccgcccgacccagggctcggactcgggctaagtcccggaagacggcgaactccgctccgcccgacccagggctcggactcgggctaagtcccagaagacggcgaactccgcccgacccagggctcggactcgggctaaagtcccggaagacggtgaactccgctccgcccgacccagggctcggactcgggctaaagtcccggaagacggtgaactccgctccgcccgacccagggctcggactcgggctcagccccagaagacgacgaactccacgccgcccgacccagggctcggacttgggctcagccccagaagacgacgaactccgctccgcccgacccagggctcggactcgggctaaagtcccggaagacgacgaactccgctccgcccgacccagggctcggactcgggctaaagtcccggaagacagcgaactccgctccgcccgacccagggctcggactcaggctcagccccagaagacgacgaactccgcgccgcccgacccagggcttggactttggctcagtcctagaagacgacgaactccgctccacccgaccccagggctcggactacgccccgacctcagccgacggtctccgcctcgcccgacccaggggctcggactcgacctcggccacggaagacagactcgacctcggcttcggaggagcttccacatcgcccaacctagggcgcagaccagccacgtcaacaggaggcgccatcatcaccctgccccgagctgactcgggccacagggaacaagaccggtgtcccatctggctcgctccgccagataggcaatgatggcgccccgcatactctgtgacgacggcggctctcagcccccttacggaagcaagaggacgtcagcaaggactcaaccgctccgccagctgtccctccgtcaggctccagcactcctccgacggccacgacatcacatcagcagggtgccaaaatctctccggctgccacgacagcatgtacttagggcgctagctctcctccgctagacacgtagcactctgctataccccccgttgtacacctgggtcctctccttacgcctataaaaggaaggaccagggccctcttagagagggttggccacgcggggacgaggacgagacacgcgctcgcttgaagccgctcgctccctctcccgcgtggatgcttgtaaccccctactgcaagcgcacccgacctgggcgcgggacgaacacgaaggccgcgggattcccacctctctcacgccgatctctggccgcctcgctctccccccttcgcgctcgccctcgcgctcgacccatctgggctagggcacgcggcgacgttcactcgtcggctcagggaccccccggtcttggaacgccgacaatactgatactaattatgttacatggtgtacgtatttatgcaattcggtacactatgtaaaaattttttcctgctctatgcacacaaatttaggatgacaggaatgtgatgaaaggaaattgtcacacccggttctgggggcaaaaccgaatgcatagcgtatgtgtgccaagatccatttctacacatatgttgacgtcacaagtgtaatatatcaaaagacaatacaataaaggcgtaaagagagtagagtactgtattatatcatcttaatcattgtatctttaacatgtatcaacatcaaagtaaggcggaataaaatatgggtaatctcccacaggaagatgaccggcgcatcgttagactcagtattcatcgaaatttccatcaatgtcttcttcatcaccctctaatcaaaatattagcaagggtgagctcacttatggccggggctcagcaagtggggaaaaaattaatgcaagtttaataaggtgaggctaaggttgagcagtaagcattttagttggtcaatattttattagcaacgcctgtcttactaataagtgtgtatcccaagtatcccatttaaacaaaggtataagagtatatcaaaagcacttaagtgaaaccacttaagcaaaccattggcagatcaacagatctcgatttattgtccatctttaggttcaattatcatgtgagggtccaggttgctcttgaccgtgaccacggctgacatatcagttttacactctgtagaggtggtacaactttacccacaagccatatatcccatctagtctgggttgatcggacccgtaaacactgccgaggtgaatggctagggatccattatgaggctttcacaaaatacacttaatacaaagcaacccgctaaggtttccaagtcggtatggaggccctctgggtgaggtaccttagccaagaatacgtccccttgttaacgtgagttgctgccactgtcgctccccctcttgcccataattcaggtaaggttgctaggtactaagcatataaagctaattatcaaagccagagctatgatagcactcgtggttgcactgttatcctgggtcactccatgtttcaattaatatgaaataatcttgtttaaccatcgggttaacaccataatgccaatttcatttccggaacattaatatcaaataatgagtgacatcaaaattatcaagttgagaggtagaacaaattttgcaaagcatagtattttccgagggtaatcaaggaattcagttggtaaatctaggaaatccttagttaggcaaatcccatcaaattatgcaatatatcaaaaaaataaacattattatatgcattagttgggtacaaatagaatatgcagagggaaaatccacttgccttgctcaaaagtttcctgtgggtcgtcctcgaacgtgtttggctcgtctacctcacagtccacttctagcatcgatttgcgtatcgcacatataaaagaatacatacgccaaataaataaacatacaccaacacaggggtaatcattcaccattacattcacattcatacatcacacttatcacactcataattacgttttaaagcgtaaatacttataattcattatgactattactgcgagtcattattgatgaaattatgagtaggtggctataatgctagttctaaataacattctttaagaaaataaatgctaattattttctttattactaataataaactaataaattttattccttttattactaagcagaacttatgtgtatagctaaaaatggtttattcatgactctactaacattaatattctaagaatcaataaaaatcatcaattgggctttttataacataaacatggttattttgacataaataagttagaagttaagtgctattcttatggacacctttattttggctagtaaaaatctattttcattatgactaggggtattcttttagtatttttctttctttctaaaagaaggtattattaataataatcggagataaatcatctattaacttataatatttatattgccatgaattctataccatgtactagttccatgttaagaaaagcttctattatctattaaaatgaacttatgattataaccttccaaataatttccaaaattcattgtgaacaaaattaactataaaattacctatctagtgtatttatcaccaacatgtgtctatccatttttgtcatacttctctctaatccaactttctaaaagtcatcgtaaacaaataacatgaataatcacggtgcactaatttatcgcatatatctaccaaaaatccatagcgcacatacgtatgaattccgaatcacaacatgctcatattacaacataataattacatgaattcataaactaattcaaaaagtgatttctaaaatatacaaaattatattttgggtcgtcttcaaccttgagcttgctcgtgtaaccggaaagagatcgttgggggttcggtcgagtggagaagagcatgggctcggcgtcggacggctcgggcggtctacgaagctccggcgatggtgtgggcgaactctggcgacggcggcggtggctcgaacggcgaggagagtgagagggagaagggggcaagctcaggtagggaggagcaagggctcggtgtcggttttatagaggagaagggagagaggaagagacgccagggagagagagaggcggtcggtcggtgcttcaaggccattgatggcgtcgacatcaatggaggggagagtggggaggagaaacggtcgatttgatgctccttaattcgagaggaagaacggatgcggggcacggctcgatcgcggtgcttcggccgtggtcggggcaccggggcggctcggcgacctgggtgcagggcgcgaccggggtcgggtcctggcgcggtcgggcgtcggggctgggcgcggctcgacggcatgtcggctgtgcagtcgggggaggggagggagaagaagagaaggggtcgggtggggcccgcgcgcaagagagagaaggggaggagaagaaggagggtggcggcggcggctggggagccaaggagaggtgcgacggcttgttaatgggcccctagtgggccattagggttaggttagggttttttatttcaaaatatatttttaaataaccctaaaattcataataattaaaccaaaattatttataaataaaatatttatttttggcctaataattattatattatttatttgaatttttatttaagaagaaatgctattaaatatccaaaatcaatcatgagcaatcaaaaattatttcaaatgcaaataagtaacaaacagttgaatgaaaaatttattaccataattaccattaataactaaatgcattatttttagttgatggtttttatagtgttacataaatggattggcatgcatgaaaacaaaaaaacttatttaaaatgatttatttcctccataaatgtaggatcactccaacaaccatgtagttagtctcattagaacccgtttatgatatatactgatattaattatgctacacattgtaggtatttatgcaatacggtacgctgcgtaaaaatatgacatgcgattcactggtaaacgcatctccatgttcgagtgtaaaaaccttcagttttgagtgtaaaaactcgcagttatgagcataaatactgatcaacatgaaagttgttgaaaacctcttgatgttggcataaatatgtatacaaagtgacataaaaatgtgtatgtgattgtatgtcatccctccactaggaacatgtattcaggcgtgtcccctaccatacgcacgcatgcagtcctatttttatggcagatctggaaaatacggcaatcattaggcacatgcatgtgattcctatttttatgcagatccgaaattatgacatgtcatcggagtttccattgcatgcacacaaattttgaatggcattttcgttcccactgcatacacacaaaaattggatggctgatatcgtgcaaagcataaatcattatttaaatttgcataaacacctacaacgtacatcataattaatgaaaaaactaagtatgggctcaaccaacggttgcatgcataaacaaagaattggaggaggtcgtcgtcgaaggacgccgccgaggcctccggattggaggagctggtcaccaaaggatgcccgaaccgtcgtgcataccaccgaccctcgcagcccatgccacgcgcgaccgtcatcgccaccgtagctacccgtgcttagcgaggcaaccgcctccgcttgctcgttggggtcatcgtcgctcgcccgccccataaaacaatgttcataactggtacaatgttcataacatacaacataaaacaatgttcatagcatacatacaatataaaaccaacatagtttatagcattcttcacatcatagttcacaacgtagaactcacaatcactccatagttcagaactcacagtccgcattcactacattgttcacatcattcaacacccacacaacatcatctagctataatcatcaacaaaagttgaaacaaaggtttagctttagattgctctaatgtcatgaatatctaacgagcttcccaatcttgtttcagtagttgataacaaggtgaagtactttgcctgtgaaaccacgctccataagttttttagtacacttctccatattcattggaccattgaaaatatcatatgctattttgttgtcttcttgtagaaacctagaaaattgttgaccaatgtttgatttcgtgttggaactactaggtgtgtgggacatcttatgtccgttggcggagcagttgaggtgacttcaattggagaacctaggataacgttaggctcgacataatggaacacatctagccatgtactcacattctctttaagttgtttttccttcctacactaaaaatgacaattgaaaaaggtccaaagatgaaaataagtttcatattacaatatggatgccactattaccttatgatctttgtctctctttttcatttgatcaattgagctcttaattcgtctgtagtcatggtgtttgctcatttataagtttttaaccattctagtaaagtaatatcagtagttctccatgactcatatccatcacaatgaaacttctaactacagagaccaagacatagtctcctttcgaggtccatcagttcactgcagaggattgacacaatcattggctcaagggcaggtgtgcgtgtccaatgtcagacgaccgagttcggtggtgcctgggtgcggatcggtgttgagacacacaacttgtggcagagcaagaacccaaagagacatgttctatttggcatttcgatttcacttactagacgattgaaaatgtatgggattaaaaagataaaaataatgagatatttcactaaacaatgtgtacgatagattgatctaaaatgaaagaagcatttcacttaataatatgtatgtcacattttcaaaatatttgttgttaaattaagccataaaccctaaaccctagtttattacattgattttatcttgaaactagtgtttccatggtctataatataatgtgtgtgttatggacaaatattacatagaaatccaaagacaaccccctggatgatatatcacagtaatctgaagtcattagcaaccttaccagcagcaatccttaggcgaagccggttgcttggagtcattgcgggaaggcagctgcttggtgtccatggcgaaggcgaggaaggcgactacgctacggaagatcgataagggtgcagggaaggctctaggtgaggaacggatgcgggagcacaacaacgccgcaggagagtggtggcatcgtgtctatggataaaggtgatgcaggaggttctctagcggcgtgatatctggttcgggtctgcatggatggtaggagatatatatggtgcatattagtatcaattcttatgcaaaccttgtactaaagctcagtctttaataccgatccttgtttaaaactagcactaaagactaagtttgagtaccagttctaaaagaaccggtgctaaactaatattggcacaaattctaattgcgccggtaggaaagtaaaatcacttttagtacaggttgtatataataacccgtgtactaaaagcctctcaggtttatgaaccggtattaaaggtttttaatcggctcgtggattgaaccagtacctcatattagcactggttgggaacaaaagccagtactaatttcttttgtatcgatctccacatttaaaacaggcacggaagctggtgtcaataccggttttaaataactgaaataaaagttgttagaccaaaaccctattctccggtattctcatttgcgtctcgcgcgcattttttacattacattattattacaggactatacagattggtggatcaattttttatcctccgtacgtccatgtgcaagacagactgtaatataacttgaataatgtacatgatgctcctataaatagccaggagctaagcctagctaggagggttcgttgtcgccgtcgaccagcaaaagctagctagctagagaggcgaagtaactttgaagcaagcagtaaattaacccaccttattatcagttctttaccgattaattcttcagctagtttcatccctagcttaattaatttttccccttcgagctagcaatggccatccaaaagccatacaatacaacaacatgagcacggtggctctaacggtactagtcctacttgtagcctgcagtcaagtcatatcagctcattccctagtactgcagcggtcgtcgtcagctaccacgaaagcagcagccgcagggatgatggagggcacgatcattccttaatggggtgttggtttgagaaatgaggtagtccatatcttctcacttctcacttttttgtttggtttgtggaatagagtgagttaatccatcaccaccttattcatcatagttagttgtttagtactaatatgtgtaatggagtcatctcaccaaatttgagaaatggactcatgatgcaccacttcattttggatagagtgattcatcaaaccaaacacctcataatttcgtctgcttgttaccctaggtatatgtatgattagatatatgcatgagtttggcatcattctcgatctctgtcctcttcgctttagggggtgtttggttacaccccgctaaaatttagcccctgtcccatcgaatgtttgaacctccgttccgggtattaaatgcacatctacaccagcagcaccttctccagcccaggcaccatcttccccagtccaggcgccaccccttccacctgggccagtgactcgggcccgtgcaagagaattgaactacatcatgctgttaaagaacgaaggcccggaagaatagacgaccagcccaactgcggcccataatgcacgacctagggttggccgcccctaggggctgcgccccctctctatttatccaggagctgcgcctcctttatttctagagttttgttttacgttagctttagctactctcgaacacgcgcaaatctgcgctgtcttcgtgtattcagaactccaccctcgagtaatagattagattgctcgcatctttttcttgttcgttcttcgattgcgcacaggaaatgatcttcgtgatcaggccgatctcgcatcagcaaggtcggtaaccacaggaagttggttcagcgattgcattggcgcctcgggcttgctcgtcgtagtcggatcgcaagggtcatcttccgccaaatcggaattatctctactcgccgaaagatcgggcacctcagctacatcaattggtatcagatttccaggttgatcggtgagtttatcgagtgttttttttcctacagtccacaaaaccacataaaaattcaggttagaccttatcccagcacccttttgagcctcgcactttctttcaataatctgcattgttgaatttgtgtgctttcgcgtcatttgttgctggttgcattgtgttcttccaccattcaaaccctagcgccgccaccatctcccctttgatcacgccacaaaccgagtcaacattgtttccttgtttttctccttcggttacgtcaaaaaaaacagaaaaaacaaaccgagtcaacggccgtttccttgtttttctccttcggttacgaaaaaaaaacagaaaaaaaaacaaactgagtcaacatcgtttccttgtttttctccttcggttacgtcaaaaaaaacagaacaaaaaacaacgaaggagaaaggatatagttgtttcatcccggtcgtttgaaaacataacttgaggtaccttccttaaaccgggcataacttttcgctcgggtgtccaaaaaatctgaaatttttacaggagctagttgacaccattctgaggccggccaaactcacctttggtctgtttgggttcgtcaaaattgtcaaaaaaaattcaggaaaataaagaaaaaaatccgtcaaagttctcgcacgcttttcagagaacttcctgattttctgtagaccacatctgatctctgttttaggtgaaacttcgtctagctcctattttgttgcttcttgtgctgagaaaaatatcaaaaaatcatacaaaaaagaaaaacaaaatcacttgtgattcctactagtggcctcgctagtacaatatttacggtactgccattctgctagttccatccgtcctttgcacttgtggccagcaatatagtttcgtgttctgcactataattcaactttgcattattgtttgattgtgctaatcattgacttgagtgcagcctacccagaactccacatatttctacgacgagcaggcttctgtttctccaggcaatcgctcatccaatctttcaccggttccacctgttggttgcagttcaccactgtggcttggtaagaacggataagaatttgacaacagcactagtgtgagcgccttgtgagcagtacacccctgtttttgtcgttgttttttttcttcttcttttggtgttttggtgtttgcgctaactatggcaggagcacacgacacggtggatgcccagttgctggaagtaaggggacaagttgatggacttgctgatgacattaggacgatgcatgaacggcttgattcaacggtcacttcgacgaccgagcgtttcaaccagcttgaccttgctcaaacggcgactcgcaccacactcgacaccatcctggcacgccttgatgcgttgaccacaaagatggagcaggactacggcggtgacactgagtgggaagatcatccccctaatgacttattttctaagattaaatttaaaattccaccttttaatggcaaatatgatcctgctgcatatcttgattgggagttagaggttgaacaaaaattttcatgccatgatattgctgcacattctcaggttaaagctgctattagtgaatttactgattttgcattaatttggtggcgtgagtttaaaataaaacatcccactaccattccaaccacttgggatcagttgaaagctgcgatgcgacatcgatttgtgccttcgtattatgctcgtgatttgcttaataaaatgcagcgttttcagcaaggttctcaatctgttgaggactatttccaggagttacaaaaaggtatgattcgttgtggcatattagaggacaacgacgctgctatggcacgttttcgtggtggtttaaaccgcgaaatccaagatatacttgattataaggaatattatgatatgactactttatttgaatatgcttgcaaagctgaacgtgaagtgcagggacgccgctcgaagccatattctaacccttttgcaggacgaagctcgacatccacctcagcaccagttccccctgcgccatccacgtccaccactactccacgcgagaagacgaccaaaccagccagcactgccccacccacaggtcgtacacgggatattcagtgtcatcgctgtagaggatttggccatgtgattcgggactgcccaaacaagcgcactttgctcattcgtgacgatggtgagtactcttccgctagtgattctgaagaaattgaacatgcactacttgccactgaccatgcagctaaggtggaggtacatgtcaacccgggcgacgctgataggtatgaaagtcttgttgtgcagcgtgttctcagtacacaggtcgctttgcccgagaagaatcagcgacacactctgttccatacaaagggtgttgtgcaggagcggtcaattcgcatcattatcgacagcggcagttgcaacaatttggcgagtaccatgctggtcgaaaagttatcgttacccactcgtaagcatccaaacccatatcacattcaatggcttaatgatggtggtaaaataaaaatcacacgttccgtgcgcgttcctttctccatgggtgcttattctgattttgttgattgtgatgttattcccatggaagcatgctctttgttacttggtcgaccttggcaatatgatactgatagcttgcatcatggtcgttcgaatcattattctttcatttttaagggtcagaaaataattatacatccaatgacacctgaacaaattgttaaagatgatcttgcccgagctgctataactgctaaacaacttgatccatcgccctctgttccttctgaaatcaagttgaaggctcctgttttacttgctatgctacacgtgctgattttgatgatctacacggtgctcatttgccatgctatgcacttatatgctctagtgtcctcatttcacttgatgatgcaccatctttggctattccccctatggttgctaaccttttgcaggagtacactgatgtctttcccaaagacttaccaccgggtctcccaccacttcgtggcattgagcaccagatcgacctcattcccggcgcacagcttccgaaccgcgcaccgtaccgtacaaatccggatgagacgaaggagattcagcgccaggtacaggcgttgcttgacaagggatacattcgtgagtctcttagcccttgctctgttcctgtgttacttgttcccaagaaagatgggtcatggcgtatgtgtgtagactgtcgtgctattaataacatcactattcgttatcgatatcctataccacgccttgatgatatgctagatgagcttagtggtgccattattttcactaagattgatttgcgtagtggttaccaccagattagaatgaaactgggtgatgaatggaaaacggcttttaaaacgaaatttggtttatatgaatggttggttatgccgtttggattgactaatgctcccagcacttttatgcgagtgatgaatgaagttctaaggcccttcataggattgtttgtggttgtttattttgatgatattcttatttacagcaaatctaagaaagagcatttggaacatttaagtgttgtttttgatgcattgcgtgctgcccagttatttgctaacatggaaaaatgcatcttttgtacacgacgtgtctcgtttcttggttatgttgttactccacagggcattgaggtggatagcagcaagattgctgccattcgggagtggcctacaccgacgacggtcacacaaattcggagctttcttggacttgccggtttctaccgcagatttgttcgtgattttagctccattgcagcgcctctacatgagcttacaaagaaagatgtgtcatttgcttggagtgattcctaggaggaagcgttcagcactttgaaagataagttaacccaagctcccctattgcaattgcctgattttaataaggtgtttgagcttgaatgcgatgctagcggtattgggctaggtgctgttttgttacaagaaggaaaaccagttgcttattttagtgaaaaattaagcggtgctagtctgaaatattctacttatgataaggagtcggattataaaactaatttgtcagccgaagattaaaagacgagacgaatctagtccagttggttgggtctatatttcatacttctatttaaaagtcaaacgcttgatgtgacccgggctaaactttagcaggagcaaccaaacacccccttaatttgctaattccgcatacacctagacgggactagcttgcatttgtttgccatatatatattatttgtttttttttctagtccgatgattgcatatactaattcttaaagaaagtacagagttgaatgcctgcgcccaatatgaagggatccctatatgaattagtaagcagagatagagggaaagcagctttctttcctttaaaaaaacgaactaattaaggatccactagataatagcaacagtccaaggctccaacaagtagaaaactgaatactgactgaatgcgaggcacatgcgtgcgtactgcgaggtgttgtcgccatatcgagcgtgtattcctcctccctttgtcttgggaactagctctccctacaaaagtacgtgatagctaggtacattccttttagggggtgtttggttaccccaaactaaactttagcccctatcacatcgaatgtttgaacctccgttccgggtattaaatatagtcggattataaaactaatttgtcagccgaagattaaaagacgagacgaatctagtccagttggttgggtctatattgcatactcctatttgaaagtcaaacgcttgatgtgacccgtgctaaactttagcaggggcaaccaaacaccccctatattaggtaaagatgtttcctgctgggtgtaccctcgcgtataatgttgtattgcatttccacttacggttgtgtcttgtgaacgaactgaaacctatcgtcgatgtttccagctgtacaaggcgaagagctaccctctctatgttttgtccaaatcatgtaatccttcacaaatcctcgacataccagatgagatattatttgttctctatcatcaaatacaacaacctttttgcagtccatacatggacaatatatatactttgtctttgttctctaagcatagttcgtagcgacattaataaacctatgaacctcggatatgtatgatcgatctagccttgataagttatacatctagggtgccctcgccatcatcacctgtaaaaaagtaacataaacacacaaggaacacaaattgcactagtacagagaagttctatagtggcggttgtaaaccaatttatagtggcgtttttcgtaaccgccagtgctaggggccagtagaaatcatcatttttacaggcgggtaactgaggaccgccagtgaaaatcgattttcactggcggtcggcgtaataaaaccgccagtgaaaatcgattttcactggcggtcgacgtaataaaaccgccagtgcaaatcgtttccaggaaacataaaacatattttaaaaatagttaaaaaatttatttttattaggggggcctcagcccaccccacccgcccgtctccgtcgaagtcgcaagtcgcggcatttttcgcgcaaaattcgcgcgctacgcggttgttagtattcgaaccgtcgacctcaccctcgcgcgtaccctagtttatcttgtgtctagtttgtagttgttttctccacatattacaaccatttgagtgtaaattgcttatttgagaccctaaacgaattcaaataaaaaagttgtcaactacaaagataaataacttttgaagttctacaacttttattttgacacttttttcatctgaggtagtttgcaaaatttgaattttaaatttgacatacttagattcaatttttgagaaccgaaatgagttcaaataaaaaagttgtcaactacaaagtttcataacttttagagatcaacaacttttattttggtggttttgtcatacgaggccgtttgaaaaactcgaaaaattaaggataaaaatgatttctagtggcggttccttaaaaaaaaaaccacaaaaaaaaaaaaattttttctgggtgtttttttaaaaaccccccaaaaaaaatattttttttgggggggttttttttaaggaaccgccactagaaataacacagtcggtggataaccgaatccgcctgtaaaaatatattgtccccgcaggctttgagcctttttgtactagtgttggcaagagaaatatgagcttaaaagtttgccaaaaactacaactgcttaggcgaagggtttttgactttctcacggtctctttctatagaagcgttttcaatacccaccacagctttttcaaaagacatagcttaaccaaacataatctacttatagatcatgcatgcatgcgtgtgtttggtacggctccatgttaccaataaagtcattttgttcttaagcttcgttcatgaaaactcaatcgatatagataaagttgtttatcataatatagtttctcataataagaagaaataaataatataaccgtaatgccgttcgtttttttctctccattcaattctttcacagggcaagggcatgggcagcaccgtgcatccatgttactcaagtactacaagtcgccagtttgcttactttttaggtccctttttaatttcctattcgaccgatctgtgtgataaacaatttaccggttaattttaccactttggccctcaaacaaactggctaataaattgactaattgttagtcgggggctagcaaactgtttgcccattagtcaattgaccttgttaatatataggtgctaatagaacgtataaagagaaaagacatatatattagcaaagactccaaacataccctggctaattgttgctagcaaactatttaccgggtaattgttagccactggcaaataattagccgcgaggatcaaacatggtcttagtcgtcgttattattcctttaattaattttactagaggcacacacacaaatgtgagggtcatatcctaatttaattaccattaacttcttatccatcttatacaacctaccaccctgccttaggttatcaaccgtagctttgcacctgtttaaattacatatgagtggaacatcctcagtccacatcatgtcagaaacccttatataaaaaagtttggaaatagtagataacacaaccatgaagggacgcctaaacgcaagatcatcatcaagctattttgctgcaatcttttttaatgtgaataataagtgtcttgggcttacaaaacccatagaacctctttgatagcgccttaatttctatgatcagcttcttccttcttatcaacatgtggaggaccaaccccaacattgggtaaaccaaagacacaataaaaaagaggaatggtccatttgtacacaaggttgacatttctctttgatatcctaatttaaagtcattctaataagattttgtcgcgcgacactgtcgctcgttctaaagtgtacataaatttgacactagattgaattgtttatgttgaggtgtttttggtgtcccttggggtctgtattgagttttgagagtcaagccatgtgtgttctaggttgagaattttttgtgcctcacattcgtcggatccttcggtcacaaataaatgatgtcactaaataccttgatctctagctttactttgatttgagaaattacttagcagtgttcttttctctagttaactattaaagcatgtccatcgtggattcttataaaaaagagtcatatatctatatgttattatcatgcataaatatataactgatgagtgatgcatggcaactttgtcggcaattaatgtagctgttaacagcattaaggtggtgggtctccgggaatacttttgagttcggggtatactagccaaaagatacaaaattaaccggtaacatacacataaatactaaggacaagcaccgtgttaacgctaacgacaaacacaaatggaggatcaaggctaggattccatatgtcgtactataactgataaatggcagcgagctgtcgtccaacaactctggtcaggctggaacgttccggtgaccttgttcggttagttctcaatccatatgaattgagtgagattaggtggatttaaatcgaaagcaagttaaatctcttcttaattttttccaatctcattcaatccatgtgtaatgtgaataatcgaacaaagccatagtaaaattcattatgtattttcaacatatatactaattaaagttcatccttagggacatatatgatctcatgcatgttcccacatctctagctagctaggtttatatgtcctacatgcacataattaagatgtagtccgtaatttttaacatacgtgttagaaagctagtgcacgagtatatatggcatctggtccttcacctcctcggctcctccatgcatgtccttgtatatagcttgcaaaagagaggagtttagtgttgctatctgattaatccatgtaatcaaatatgacactttgtgcccaccatgcacatgtgccagcaggctaaggtagttatctctactactccttatgtttgtatcgtaggcgtgcacagtccagccggttttgccgtcgcgctccctccgcctccctccgcgctccttccgccctccgcgctagatccctgattcccgtggcttcgccatcatcgccgctcacgcaccttccttcgacaaccttcctttcatgatgcctgttgctccttccaaccttggcacatccttccatctacggcacccactgtgcctccgccctgccgcgcgtgccccgcctcgtagcccccgccggggacctctgcttgggccgcgccaagccaggtgattggctcgtggacctcgaagccgtcgctgcgggagctagcattctacggctgtgggagctagcgtcccgaccgaggtcgtcgccatcagtcaatggccatgcctcgcctccgtgatccccgcatcgcacgccccccgcaccgtcgcaggtttgttactgccgcatccccctcacccccacccaccgccgatttcgtagacctccatgcacgccgcggatttcgccttcctgaagcaccctaagatgtttgcgctgccgccccaaccccacttaccaccccaccgggcacgccatgacagggaggtctgtgcccgctgcccacaccctccgccccaattcacaaaaccctagcgacctcgatttctcaccggcatggtcatcaacacctatctctcagccaccacagccggtggtggctgatgcagttccagtgcgcgctcatggctgcaccgcccatgtcgatccccatcaagaagttgtcctggaagaagagcacccgcatccgctggcctccaccgacgccaccacctcgcctgtgaaccagttctcgttgaggtacacgacagccctgtcactagctgtcttgctcctagatcttagtttattgtggtcgtttatccctagagtttaagaatatgtggatccctgcaaaataattctcgtttgtaatggtttgatctgtagtttctttgtcgtttaagttccacttctttcactgcaagaagatcgcctgttgcttttttggagtagcactgagactgaaattgtcaccctcagttgacttgatccaaaaaatgtgccaaaatgtttcataaaactaggaaagtacttctcatccttatttctataaggtttatgcatgtgactttttcccttgtttcaggtcctagccaaagagcaagttgatgcactatcgaaggaattgtttgcgctttcaaccgtcacaggtattttgagcacactgctggctacttgtgttattgttttgaccaataaaatctataatttatctgaacaaattgatgcaattgtctccctgttctaaaattcaatggtagtcacagatcttagagagctctatatgtttctgttagtatgattgtgttaagtttatatgttctatcttgccactttgctctctagcagatgataattaatatggttgcagttgctgctcatgtctaaagacaatagatgctatcccagtagatgcacatcctatgacacagtttaccacattttcaaaccacattttcaatctgctctctatcttctgaaccggtaactgccttcttcaatatcgaccaccggccggtccacctcttcaataatcgtccttcatcccccttcagttgtgagttgtgacatactatttgtattcgaatctgatctattacaagtatacatggatattatagggtgtgcatctgtatacccatgttccttacaaggtccgtccctaggtgatatgagtagtaagtctaaacttgcttcttaccaagagttaggatgtatgtgtgtatgtattttttagtacaatagtattcaaaatttatgaggaccctttctttttgattgttttgaacaatgggcatatgaaccggtggaagaacaattcgtgcctgcagtgttatctgccacctatctttattatgcttatagagtgggagataacatcccatatgacattgtacctaatcctcagctatttgatagttgtttgtgttttaaggctgcatgggtgtattacagttttggcggtatccattgtttgaacgatgggagtatagaggacttctctgcataaataggtaggtttcccactaatttagtaattttgtctgccacatataaattgcaggatagcagttgacgtgcctttgcagctcatattcactcctatgtgtttgttgtctgggttccttaggtgtttctaggtagggatgcaagttggctagccctcaaacccgcatcgccatcctaattgctctgtcttgaatgtggttaaatggggctactgggatgggattttggtgctcggtgctgctggagctaagcttattgtccaaatccagaattataggaagatgaaactttgttgtcaatttcaaatttattttttctatggatgtgtctgtctggaattacctaactttgcaacctgcaatcgataggtatcgacaatgagacggatcgtcgggaccagcgaagccccgcgacgacgtagcaaccagagccctcccgcgagacgattcccaaagttaggtgtgtgacttattccattatttgtaccacatgattgtcagacatattaacagcacaagattgacaagaacactcatgtattttccagtaaatcatcttgattaccttggtgtacaagttgcatgggtcactggtccatggttcctatctattttagtatttttatgaacatgcttccctgggaaagtggtgagccttattctgtattatttgaaacatctacattttcctttttgaaatgatgtttctctgcttgacttattttgtgttatttgaaacatttaccttttccttttcgaaatgatgttcctctgcttttgcaatataagataagtttattgagaaatgtatttcaaacagtagggccttttaagagaccatggttgcttttgcaatactgtaaagtgacacttaccctgagtagttgtagtgtaaggtctattgtcattaactattttttatagctaatgtttacttggtctttgtgcaagtatgcttggactaatattctgtttcttgagtagactataagctattatcttctctagaaacaagataagtcattatactgtaaagtgtaaggtctattctgtttgttgagtctggttgtatcattgcggtcataagttattttggagataactttggttgcagatgatccgttcagcatgtcctccctatttggagtcccttggcacacttattttttcctaaaattctcaggagtccttatctattgggaattatggatggagggagtagtatcttgggttgatgagaatactatggttgttcctgttccataaattttgttgcattgtggtgagagtttgagaatgttcttctatgtttgttctcttaaactagatgttaacatatattaactatttggttttaggagtagttgttggagtaaaaagatgttgggtcctaatccctagaaatcagttcctaattttttaggccccaattatagaagtccctcttggaaatgctctaaggagaagggttttgaggcaatgatttatattatctcccttgatgtttttaattattctgtggccttgacagttaagaaaaataatcaatactcaatgaagatggacgacgtgagtataatggtgacgacaaaattgcaataacagttattggaatcgtaccctgactcgagcaaaattgaatccaaaatcatcacaatgatactaaatggggttgtacgagggaattaaacgaacaccacacatcaaactatggaatcttcagatttaaggtaccagctgaaatcacaacattgcatatagtgacatgaattcaaaacatagctaaggcagtgtccaattcttggtaaactagatgtaaaatctactggttgatatcagccttcttctgccacagcctgtccaaggagctgtctgcgtcgccctgtgcacaacaaaatatggaatcagaatctaccactatacaacggacaaccaaacatagcaaaccaggtaactgggcaatccactagactaacatataaaccaggacaataaaaaaattgttggctagctgtctaggtgcaatgtcacaatggatttagatgcgtctgaagtctgaacacatacatgtaataaaatttgattcctggtaaaactattaccaactcttaatttgaacaaatatatatatatatatatatatatatatatatatatatatatatatatatatataaacacagcctaaatcctaggctaggaattaaccaatgtgaagccatataaatccaacaggcatcgatggaaggtgcatcccgcagtccccacctccgcacatcaggcccaacccgcatccttgacgaaaactttcattcacctcccatggatgcgccaacctaccatcgacgtcgaggatgccggggctttaagatgtccaaacagatgctccaccccattccaaatcctccccagacagcaactgcaacttcgacctgattctggtacatcttctctactactcatacctgagtatgtacctgttactactcatacatgttagtatctactactcagtcagttcgtgcacacatccataatttcaatcgcagccgggtactttcctacttacaatacaattattatgtttgggtaatcagttttattctttaattttgattttgattttggctagatgttttggtaaccagacatagcatagcttcagtgacttaatttcttcccctctaaaacacatggctatgatattcggatatttttattactattgcacccaagtaatactaagtttctcttataagatatatactgatgcaagtcagtaagtcacaagtaatcacatgggatttttattgtctttttttatagaacttgcatgaaagctattaatatgcttatcctatatttttaacagaaaaatgaagtcagcaaggaatacttcttaaaaactgtaaggaatattgttggtgataaattgcttaagcaagctacttcacaatatcaaatgcaggtaaataatatttccacttcattgtgttatatgtaaacataacctgtcttgccaccatagctttgtatttttggtgtgatgcaatcttattagtcattcttaccagcactttttgttttgttttgtgggttatttactcatgtttgctcaggcacaacaaagccctcagacaaacccaagcaactattctttatcaggtcaagtttctggtcagcagactgctcccagtggttctgtgacaggagatgaacagaagggatatccaggggcgcacaccatccctatgagacaagctattgccagcactcgaccacctcaatttcggccttccttgtctggccaaatgcggagtaatacgggttatccaccttcacaaaccaatttgcattaggctaatgaaatgggaaacatgtcagatgggaaaggggtccatatgttacaaactcgtccacccaataactccataccagtacaaacaatgcagcatcacgtgcagcgaccacaaacatcttcaccagtgtttggggcaaatagtattcatgcacgtccatttccgcggccagttggagatccagctgcaccatttagaccacaaatggcagattccaatccaagagcacacttgattcagggagctgtgaccacagtatctgggagtgtgccaacacgatccatagtgtctggaaatgcgccaggtaatcaatctacaaggcaacaatcagcaaacaaggagcaaaaaactatttcttttgctccaacaacacatatgaataatgataggttgataggtatgaatacttgatatggccttttaatatactaagggaatggtattctattattagttagctggttatagaaaacacaatttaggcgaaggggtaatctgttttcttgtgtccatgtgcaaactgctttgctctttagttcttacccatgagcttttatgcacatctttagtagtgcctaagatcttttcagacttcttataggttttgatttgatgtgcatggcaacttgcttggttcctactcctaccttataaatatttggcaatgggcattgctcagtatactttgataactgacaaatggctataaatatagtttgatcccataagctgcctttctgttttttccagctccaataaaatcttcaacatttcttttatagccttagtcaagttcaactgtttaagtagtctccatcaaatattgttctatccgaaagagatgagaagtactttaagacaaatgttatggttgaatagaatgattgaactgtagtaatgttcaaaatttagattacaataatagaatgtcattttgaaatttttatccacttgttgagttccctttcaattaactggggatgagggatatatgctctgtgtagtttattatttttcgtgtatgaccaaagcaatagcaaacctaaatggtccaattgatgttctattttttggtgcatgcacactactgtataactttagtattactttcgtgatctctgctgacagatgacatgctccttttgtagtgtctttgaagcctgaactttttgaaggattgaggtttgacttcacaaaagggttgaatcaaaagttttttcttagccacaggtaagatcattacataagggtagacctagggccagaggctcccacatgagtgtggcctggggaagggataaactgaaccaagtctccccccgcaattgcagagaggctgcttcgaacccgtgacctggtgattcagtgagacagctctcaccactgcaccaggcctgtccactaagatcattacataacttatgctatattttcccgagtatgtcctaacatcttccacagtgtttttatgggctccttagaagttccagcccaggggcctgaaactattaaagttccaactgctcattatgaatttggtgccaattttttagatccaaaggtttgtttccatgtcacccattgttattgtggcatcttccataatgatttattccttaactcatctgcttctgtgcatgaaactatgtgtagttaatgctcattggaagggtgataacagatggaaggcttaatgctcgcgtgaaatgtgatttgacagacaatctcacgctgaaagtaaatgcacaggtagatggatcaaagagtttaggttcagtggttcatcctttccttcgttgatactttgctttccttattctactgatggttgttctcttcctagcttacccaagaggcacattactcacaaggaatgtttaactttgactacaaggttgacgtttctgacaagtcagtcaattgtagttttccaaactttcatgattagtttttttgaacgtaaatgattattttttattagcatctgtaataggcaaacttttactttgcttctaggagtagtttttatcatacatttattagttccttgaatcaacacttcacttatttgtacaaggaagtgactatcgagcacaattccaaatagggaacaatgcattctatggtgcaaattatattcaggtaaaaactctagcaatgcactttactttctaagtttcaacttacatcttgatgtttatgcgttgctgtagaaagatgggggaaatgactcatttggtagtttaatgccatgtaaaattcagtagacttggttatgtcctctattgtctattcatatttgtgcttcttgatatctgtttgagttgcatatatctttgccctcaagtgtttactgtttgattgcataactgccattaattaattatcttactactctataaggacgtaacgagggcgtccacaccgcggctccgccggacatcgcaacaatctccccgccccagctctcctctccctgcgccgaggccacaatccctgccgccccggctctcctcgtccccaaatcttgcacgcggtcgtaatccccgccgcctcgctctcctcgcccctagatcgccgcctccactatcgctgatataccagaccaagcaggtagagcagaccaagatgtcgctcgaggaggccaagctggagatggccacgctgctgcagcagcaggcgagcaagtcatgcatggtactaagtcctgcatggtactaatggttgtaatgtagtgatgaaatagctagattaaaataacaaaatttatgtatggctaggatcacaaatagattacgaaatcttttatcgtaacagtataacacacatttgtagataagttatcgcggtattatatgtttccgttgcaacgcacgggcactcacctagtagttatatatatggagtatattgcagctctagtcggcacacgcagcttcagtgtacctagtacgatgctataaatagcaacaaaatgagctcacacacatcagcccagcccagccacaccagagttcacccaccctcattccgccgccggccgctaggtatcaccggcgccattgtaggccggccctgcttcctctagctaggtagctaagctttgtaccatggtcttctgtaaggctagcaaagcagccttcatcctggtgctcgtaatcctcgtctcctctaaccatatcatgatgtactctcgaggcaaacaacccctccgggtgatgcataggaggtttaacctgttgtcacatcattccgctggggacaccatggggacagcaatgacgacccgaggcggcacagtctcgccggacgacggcaccgggagcggcggcgtcctcggagaggacacccgagcgacggatcctggacacagccctggtgcgggccatgcagccaccaacagtggggttgggaggaagttgcttggtgttgttggtgtgtaacctagctagctagaaacttgtctatcttcgtttttcttgttccttccactgccggaatccgggcctttgccgagtgctttttatcgggcactcggcaaagaagactttgccgaacgccgcactcggcaaagtcctgcgctcggtaaagagcttatttaccgagtgcacgacactcggcacagccaagcactcggcaaagactgctttgccgagcgtccaacactcgacaaagatggctctcggcaaagggccgttagcggccgtctacagctgacggccgtcagtctttgccgagcgtcaaatatctagcactcggcaaaaaaagtcgaagacactcggcaaagcatatttttatttttttaattttggttaccaaactttttgtggtatgttcctacactatgtagacctatatgtaccattttgggacaattataacagtgttttctatagctagtagatttagtttgtttatttgaatttcttcggaaaattcagatttgaactgtaggtcactcgaaacttggaaaaccgtgcatgcaaaaatgatatccatgctacttagcacaagttacgaccgatttcaggagcgggccggaaacttcgagcaccatgctcactcaacatgaccgtgaacttgccatccaggtgtttaaaaattgtataaaacacaaacagagtcagaaaatcatgaaacttgtccacgtgtcatgatatcatatgtagaggctgtgataaaaatttgaaaaagtttcgaaaaagctgtaacgcactatgtgtacaaacctaagagatccacattgaaactctatgatttcatgtgtagttctctcaggtttttacacataatgtctcacaaatttctccaaacattctaatttttttatcacagactctacatatgatatcatgacaagtggacaagtttcatgattttctaagtttgtttgtgttttataaaattttgaaacagctgtatggcaagttcacggccatgttgagtgagcatggtgctcgaagtttccggtccgctcctgaaatcggtcgtaacttgtgctaactagcatggatatcatttttgcatgcacgatattccaagtttcgagtgacctgcagttcaaatgtgtttttttcgaagaaattcaaataaacgaactaaatctactagctatagaaaacaattttctaatcgtctcaaaatggtacatgtaggtctatatagtgtaggaacataccacaaaaattttggttgggaaaattaaaaaaataaaaatgtactttgccgagtgtcaagaaataacactcggcaaagaagcctttgccgagtgccagctggttgacactcggcaaagaattgtaaaagtatatttgtcgagtgccgcccagtgggcactcggcaaaggcttctttgccgagtgtcagcgatctggcactcggcaaagaatattttaaaatttaaaaaaatctttgccgagtgccagatcgcgggcactcggcaaagtcaggaaataaactaccggtcgttcttctttctcctttctcttctctcacgctctcttctttctcttttttccctgccgccgcgtcgtctgcccctccccacgccggcacgccccccccccactcaggcgcccgcccgcctgctcgccgcggcggccactcgccgcgccgggccccctccccacggtcgtgcccgccacgcccgccgcacccgcctcgccgcaccgtcgtgagctgtgtcctcgccgcaccgtcgcgagcaccgtcattagcatttttgttaggtatgttagttttgttgctataattagttgtttgttagttttgttagcatttttgttaggtatgaatatcgtgaatatgaatgtgataaatgcgaatttgatcggatgtgatgaatgtgagttgaatatgcaggttttagtatcctccccgtgtaagggaggtgctgtcaaaaatttatacttagttatttagtagttagtgggtagtattaggtggttagtatttagtcggttgtggttatacttatagttatctatctagttattagtgggttgtggttaagcaataaccatccatagtggacattgaatatttaattcgtgtttcaaatacttgtgttaacatacttgtgattcttttttacagagaagatacttgtcttcctagccgctgcgggtctgcctgcaccgcgtcgcgtcgccactgcaccgacccgccacagccccactagcctgactccaccgccaccctaggtataacctctatttccgcatcatggtcgtagatcacgtaacccagttaggtgtctcccattcgaaagagatacggtgtagatatgcagatctttgcatatctacaaatgtatcagtttcgaattgtccacgttttttggacaacccgcgatttgagatagacttaaccgaagcgatcgaaatggaagtagatattgaaatggttgttgatgaggaggaggatgaggtgcaaaatgagaatgacttagaaatgcttgaaggcaatgccaatgacgaaattgcgccttcagatggtgttgactatgaaatggttgatagtgatgatgacacttatgatccggctaacccggacacatatgaagattatttttaatcgatgtaatgctatatttcatttattttgcatatgtttctaaatacatattacatgtgcttaattgcttactcttaattgcaggttgttggacaaagatggtgggcggtgggacgaggacgaggagggggagggggaggaggagcacccgtaggacggaggaggaggcacagcaggacgacgtcgtacagcagcaggtggagcagcaagtcgctgtcgatgcgacgcagcaggacgacgacgatgcagcgcagcaggacgacgacgatgatgccgctcagcaggacgtctcaggttttggctcctcaggttcgaggagcatctacctgcgaggtcccacgagtctccctcagcgacccatacttcgtgacagacgtccgctgatacgacccgatggagagaggtaggtaactttagatgttgttgctgctttttcatattatatgttcaaattaataatagaaactaatactttatcttaatcacttggaaaggtcttggaaggttttggagagtgcagggggtcacggccgcaaccccaatggcatcctcggccttctatgcagggaacacttccctggacttgtcgagtacgccggagtgatgagcccagcctacaccttcgaccactatgccgtcgcccccgatgcaatagatcgggacggcagagaattcaacaacaaggtggagcgggtgaagcaagagttgtggataagtcttcctcgcactatattgtttaataagtcgcatttgttgcatattcttgaaataatgtatggatacatcgtctttgtatgtaggatatcttcagatgcgaggctggatacgaggccagggcggatgtggtggctaccacgagctgtaagaagctcatcatggacatgcactacgaggcgcgcatccaggccatcgtcacttaccacggctccgtccttggggagaaggtgagcaagaaggacgcccgaaccatgtcgttgactccggaccagtacttgcaggtaaatacaaaactttattattggtactaaatatgcttaattttatcttctgatatgtcgtgtacttgtatttttttagatgattcctcattggtgcgccgcgcatcctgagtgctgtgagcagatggtgcagaggtggtgctcggctgagtgggacgaggcgcacaacgctagccgggaacggcgtttgatgatgcaaggtccctcccaccatcaaggcagccgcagcctaggcaaatacgcggaagcatgggtacgcgctcttttttatttaggtatataactttcgattagacatgatttctaaccatctcgttggttatctcgcagtcggtggcacatggtggcgcgccttgctccacgttctcggcatatgctatggcccacaaggggaaggcgacgtccgacgtcacctacaacccggatgacaggcccgaggcgtacaccaacctcgccgtccacagccgcctcagtgagtacaccgccatggccaaggaggtccacgggccagattacgatccgaggaccgaggacatcgacggagatgtcctcatgagggtcggaggaggcaagaggcatgggcggtactggattgccgacagggcaatcgactcgtcctccactcccactctatctcaggtgcgagctaggagcacgagcgcgagcccagccatacgacctcggcaggacagctcacagcatcgtatccagcaactccaggttattccttatctattcatcgttcattgattattatatatcttctctttgcattatcgtaacattagggcgaaatataacatactcagctagatgatgagaggaggcaacgtgaggagctggagaagaggatggcggagatgttcgcgtacatgtagagccttgacgccgcacagggtcatgctccaccaccttcgttgttccctgcagctgaccctgctgagttcactactcgtgtgagtatcaaaattttagtactgcatgatatatattcatatgttctcacacgtgcaatctcttccctgtgcagggtcaatcggcggtgtcgaacaaccctcacgcttcgtccagcccttcgccgaaccagtccagatgcccacctcgttgatgacctgttttgtgatgatccagacttatatttgtgagtgttggtgatgttagttatacttggtcttgtgagatacttattgagacttatgtgctgtgaaacctaatttatgtggtgatatttgtgatatatatggtgttgatgataaatgtgttgattctgtgatgcgaatgatatataatgtgatgtgaatgatatatatcttttgtttgtttggacggaacagcaaaaacaaataaaaaagggacttcctggtcactttgccgagtgtaacactcggcaaagggtatctttgccgagtgttataaccttggcactcggcaaagaaggaaacctgggaaccggtaaagccttctttgccgagtgttgtggtcaagacactcggcaaagaagccacctttgccgagtgtcgcccagcgcactcggcaaagggactgacaaaggggcccactggaggactctttgccgagagccagtccactagacactcggcaaagaagcctcctttgccgagtgcttacgaaagctctcggcacagggactggcggtggggcccactggagccgtctttgccgagcgccatgatagcaggcactcggcaaaattggcctctttgccgagtgccgaagaagacactcgacaaaggatccgtcaccgtcacttggcaccgtgacgacgacttttctttgccgagtaccaaatggcactcgacaaagtctttgtcgagtgcccgacaaaaagtactcggcaaagaggccgttgccaatgtacagttcggcaaagtgtttgccgagtgttttatatgttttgccgagtgcctaaggcactcggcaaaggagctatgtccggtagtgttccttgtttttcttctcttcccctcctttttcttgagcgatgaaaatccaatgtgcgttttcttctgttcgcacaacgaatttattgcctcatatattttactgatctctacaatggtttatccattccttgtgtgtctgtcaatcagaatagcctaccatacgtgtctccttggaccggccagtgacgatctctttatatatacaagtactagtatagtgcccatgcattgcgatggcatacaaatataatgtccaaacttggcgaagacaatgcccatgtcatttgggccagcccaagtccatgcgtcctaccagatgtgatgctagagatactgtgtttccgattcactgctagaagcaatcagcatatgcaacaatcttaagagcacttaagagctttctgtgttgtgacaaaccacctctcattggacgacaaacatataccaaagttacaaggctagagtttttgatgtttgtcgttcatatcttttaattcccgtggaaacccacatacacatacctagtaaacatataagagccattgtaatgttgttcagtttatgacctatgcaataaacataaaagagcaaccacaccgttgttcaaaagccaaacagtacaccgtgaaaaccgtccattgaacaatccaaccacttggtccttcgtaacaggataacatgaactcaaatgcaaaatcaaattttaacggagtctagtatagctccctatattagcaaaatcattcaaatttcaggcattctgcactgcaaatacatgtaaaacaagaaaattgggagtctatttttgggaattgtcagttgagaagtggatttcttcgagcgatttacagtatctctgtttgtacataagcaactcttctgttcacggatacaatctctccagttacaaaaagatcatcagaacaaaacgtcttttgctacatcatctaagagctattgtcaaaagtgttggtaggaggaaaaaaaggacctaatcctttggcccatcaagaacatataagaagacaacccagagcctgcatagtattctagtagcttctgaaaattttattgctactattactttatcatcaaggctgctttagcagtacaacgccaggacaagtacaaagaaatgaaacatgaaacaaagtagaaaagaagccaaacgtgatggtgagaacagaggatcctctagctgaacacaaaccagatcaaaatttttgagaggattgcagcaccctaagaccccatgagcccttggatcgtgtattgaagagacttcgcctagtattccttaaaaagtaaagcttgtagagtcttcataacattataatttggatccaacttatgttgctagccctgtaataaaaatgaaaagaaatgaagaatcacaaacggaaaaaggaatgcctgcaaaacgtattcttgcaattaaagagacaatggtgtgatacacaaatagacaattacataaagcagtttatatagccacagtggaatcccaactgtttacaaatggacgcatcatctttagctggaaattagacaaacaaaagaactatatgaggagcaacatgtaaaagcaagcctaattctgatatacacacatacacaaacatacatacatatacatatacatataaggatcataaatggcacaaggataatggaaatagtagggccatgtctcagttgacattcgtgaagcttcatgatgcccttttgacaagttcttaaatagaagtttagcttgctgcttatagaaatcagcatccttctaatctcgcccatcatccaacccttctgctagtggacatccattagtgacacgagctatcattgttagcttcaccatggtgtcaagaaggccagaaccactataaagtactccctccgtcccaaattaaaatctgttttacctttttagtgtatgtgtcctatatatgtgtcaagattcgttatcatacatatgaatataaacataaaaatctagagctaaaacaactactattttgaaacggagggagtattgtacaaaaacctacatagctgtaatgaaaaacataaaatgggtgctcaaaaaataaaaaacaatccacttcaatcgtataaccatcagcctatcacaatataaaccaagacatcaaattaggaatagagtgtcatataaacccacctttaacttcattcgaagggaatgaattggatggctagtgttgtctagtgttctcgcagtgcatcttttcattgatctctctttatcaagacgaatgcaacaactgctctaacaagaaaagagtctgatacaagagggtgcagggtgatgggttgataaaaatattattgatacattcacaagcttttgcaacgcaccaatttggcacagtaaaaatgttcccatgaaagagtaaacacaaagacactcaaaaaatcatgcctaaagctgaatagtaaaagcacacatgtacacacattactaatcatgaacacccttttattctttggatcaattatgatattgtatactgcctctggtggtaatcctcccttaaatctcaaattgaggttgcaaaaggaaccttctagtacagtcagctgtaaacatttgatcatgtaagaataagttactacattgtatgaacattcttgaagtaaacacaatcacatctacttctaaagcaacacgatagatagtaaaatcacacaaccccatcctcaagaacctagaaacaattagcattggtgtctgactggtcgttaaagacttaatctgctcaaaggctgctatgatatgcttttcacaactgaaactaactacaaccacatcaaggacatacattatgatgtgaccagaagtcatttttattgagcagctctctcagcttcatatatccgtccaagctcaagcaaatggaaggcaagcattgccatatatgaaattctgatcaggattctttagcaaaacatcataagcaatgagtaccacaaatccagtgaacaaaagagcctgataaaagcgggtggcagggtgctgggttgataaaaaatattattggtacattcgcaagcttttgcaatgcaccaatttggcacaataaaatgttcacaggaaacgatgaaaaggaacacaaatagacattatttctttaacaagagacaatcgtgcagttatggaacaattgacatataatactctcagcaatttggatcttacctttgatacaaagatgacattattgatattccttgggaagaatcaacacaagtacctcaagcaaaaaagaaatgccacatcggcttcaacttccttcagtcaagcccaaaatttgaagcccataaatacataggaaccccatttggcttacttgaacgaattttagggacaaatctggctttcccatatcgaagcagatgagatgggctctcttgagaggcaagagatccctggggaattgcttaagaagctgccctagacgactacattgtttgctgactttgcaagtagtagaggtctatacccttctagtccccaaaatcaacaaattatggtatgtcaaacatttatgacacttaagtagtagtagagattactcataatattgaagggtgattttatatttcacattgatatactttaatttattattctataatacaataatatttaccagggtacggctcgcgagcccacttcgagccaaaccgagcttcattcttgagctcgtgcaatggacgagccaaaccgatctcgatcagccatcgagtcgcaccgagcggagccgctcagctcgtttccaatcctatatagcatatcattgcataattactgaatcagaggctatatgcctgtgacatgacttaagtgtaatgatttacatcattaccctactaccaatacttttgtaacactaccaataggaacatcgccaacagttaatacctattttgtagccaaatacatagcattcaaatctaacatttatggctctttagttagaggatgcatgccatcaaacaaaagtaaaaagtagaaagtcggtaagagaaatctaattgagagacatcacagtaaaatattggagaaaatgaagtctaaatcaagagggtatgggtaggttgcataatacatgagtttcccaagaacaataccaaattagtttgcacgtgttaaaccaatatcatcaggatattatttcatatgttcctttatatttaagcattccaccctgtaaaaaatatgataaaataaaagaaaagtgaacatgaataactattccaatctataaccaacacagtttataattatcatacatcattgagatcatcagttagacagttacaaaaaaactatatatatctcagaggttcagaacaatgatgcaaggtgaagtcgtcattgatccatcacaaagcaaaggtgaaaataattatctaaaagttgagaacaaattactaaagaagcaaaaaggatcaatgctaaggatttcgaaacaatcaacccaccacaactacaatcccaaaaggttcatggcagcaaagggactgaatatgtttacctgatgaattccactttcatgggcaaaggcattggcaccaacaatagcttcatgtggttgtacatgaagtccattgtgctcttgtacctagaataattagagcatttgcgccagaaatttcagtcatctgaaaaattcaagcgagatagaaaaggaaacaaacaaggacaattattgtaccattttgcttgtcaaagtaatatgttgggaatttattcccgtatatagaccatctaagagctcctgacgacatttaattgccatgacaacctgaacaggagatcagaaatattaggcatgcaaaaacactctatcaaatcaattcagattcctttcgaaaatccatcataaattacttcataaggtatatcatcatataatatggcaagtacatgagctcacctcttccaatgaagcatttccagctctttcaccaataccattaatagtcacctctaacagtcgcgctcctgcatgagcaccctaaagtgtaagtcaaattagtaacccggttaaagattaaaccaatgataataaaatagaatcaaataaggagaaggtatgtaccgctaatgtgttggcagttgcaaggccaaggccattctggcaatgagtggaaatgatggcattttcaattctaagagtgttttcctttatgtcagaaattaacttcccaaattcataaggaagagtgtattcgacggtgtctgggatattaagagtggttgccccaacttttatgacttcctccagtatatggtacaagaattctcgatttgacctggatggtaattgggaaactgaaatctatcaggccgcagccttaagcgcatcaggggaaaatagatcctttgtctgtgaattagtacaaaggtttaaggtcatcctatgatgatctaacattttgcatttcatttgcgcaagtaaaccggccatacgaaccaagataaaactgcaaagagacgtacatgtcggcatcctcagggctgaactcgacatcggcgcgtactagggggcagagctggagaagggcagctcgtgttggccaccgaggtgtccttccggagagagggagatgggacgggcgacgtcggcgttcaggttggctccggagaggacacaggagtgacgcagcgtgccccttcgaggtcatcgtgcgacgccgtggtgagggttggggtagaggagccagcgaggctggaggagaccagcataggatgccagagccgtgcagatggcggcgtggggagagaacgtaaggggggtgggaatctcgtgaggagcggacgaggtttggaggctagggtgtcgcgggggcggggctggcgggggcatggcgtgcggctgattgaagggtgcagatggaggggattgcgggctcggtggcaagatggcggggcgcggtcccttgggggcgaggattgcgggcttacggatggaagggccacctggcggaggcacagtttacggatggaagattctaccatagatggaagtgggcgacgcggtttctggggcggacggagcgcagagggagcatgggaggggcgcgctggcgatggcaggcgggcgcagcgcgtggggaagacgacatcgatggaaagaagcgcggcgggcgggcgggatgcagaaccggcaaaaccgtgcatcactggccaatgtggacacctacgatagacacttaagtagtagtagagatatggggtacaatagagttgattgcaatataatgcagttgtagctgttgaagaaatagtcattttcagttttaatttaatccagaaaatcatactgatgtatgtgacgatatgtatgtgtatatgtgtatcactacccacataatcagtaaataacaataaaatattcacaaatacaaagaacagattgtaccctgcgaagggaccgatgctcaagccattagtggctccattcacacgagacatctcgtgtgtatgttcgatgtagtcgtatgtagtcgatgcaggcagatgtacgcagtgcagtcactcgaacggcgctggcgacgaggaacttgatcagcgttggtcgggtggacgaagcgagcagtcgcgagtacgctcccgaaaaacctgatcacccgcacacccgtgcaagtgtcgctatgcggaatgcgatttcggaggtctgctcttccacattctctgtgctcgcagaaggtgggatgaggatggtatgtacgcaacgcgtctgagaattgtatgtgtgttctcttgtaaccagaagcagcctcatctcctccatatatatatacacgcgcagagggaggccaacggacagtaacagtcgccatcagagctaccgttacagctagccagaaaccgacgccattagagctaccgttacagccagccagaaactgacgccatcagtgacgttcgttaatagctgacaatcattacaactcgtctgttactagccataacataggaaacggccagtaacgtacgatagtaatggatggtcatcactctaggcaaaatgtgtaaccgttaggaaggaatattcagaccaaggttcgatctaccacggccactgcccggccagcagcgcacgcctgtggcagtccttcatcattttctcagcttctcaatagatgcaccaaaggtccacctatttaagttgattgaattgtcccttgtacttccggcatggtactagactactagtacaccatagcattaaagtgagcttttatcattgactattattgaatattaatttgggctaggccctccttaattcaactatccccaccaaatgctaagtcacactaaaattctctcattatctcaaacatttgatatattggtgtttcgatggagactgttaagttgaacatccacctagaatctagattgcacttgaccacaaatgcacaatagactaggccttgaatttgtagttttgtgtggaataagtttcatctaacctctttaccagtactagattgtcgagtgcatcccttctggttggagcatataagtcaaactccatagcctttcatgggtatctagagaccacctagatctcataactgtgactagcagttaactcatataggtatgttcctctaaagatgttctgtaggataacatctttgcttcacaaagccacttggaacatattaaggtgtaaacaccaacctaccttacaacaaggaaagatgtgcatctaaaatgaaccttattaagggtctttcctctcagtctaccactagcttgtttcaccattctaattcacgggatcttcgatcacatagaacatgttaccactatgataaactttaggtgggtctcaggtccatttcactcgatgcaatatctatcacactacgtgatagccccttagtaaattgatctgtcagatttttagacgtatggacatagtccaatgctattactccggagtttctcaatttcttgatagattttaaacgcctctttatgtgtctatattatccttagaactgtttatctagattatcacagtatgattatcacagttcatagaaatagtcggcacaggtttttcaaccactggtaaatccataaggagttcacgaagccactcagcctcaactgaagtggtatctaatgttgtgagttctgcttccatagtcaacctcgttaagatagtctgcttgcaagacttccatacaacaatgccacctccaagtgaaaacacatatccacttgtggcatatatctcatcaacatcatatatccattttgcatcacaataaccctccatagtgttgggtacccggtataatggatgcctaaactcatagtaccttttagatagcgcagaactctctcaagagcatgccagtggtcatctcccaaatttgaaacaaaccggctaagtttgctcatagcaaacgagatgtcaggcctcgtagcgctagctaagtacatgagtgaaccaattatttgggaatatcttaattgatccctagctatccttcgatttttcttcaataacttactaggatcataaggtgttggagcaggttcacattcgctataaccaaaacgactcaaaaccttttccacatagtgggattgcacaagtgtgaccccaccattgccttctctcagtagcttaatgttaagaataacatcagcttctcccaaatctttcatttcaaaattaaagtcttttgtctctttaatcatttcaagactcgtacccaagattagaatgtcatcaacatacaagcataaaattactcccttgcccccaccataccgataatatacacatttgtctgcttcgttcacaacaaagccagcagatgtcagagttctgtcgaacttttcatgtcattgcttaggtgcttgtttaggccatataaagatttcaataatttacacaccatgccttcttgaccatttgctacaaacccagctggctgctccatgtagatttcctcatctagctctccatttaggaatgttgtcttaacatccatttgatggatgagaataccatgagaggcaactagagaaagtagcacacgaattatggtcaatcgagccacaggcgaataagtatcaaagaaatgatcaacttctttctgtgaaagcctttaatgacaagcatcgccttgtacctttcaatagtaccatcaggcctaagatttttattgaaaacccatttactcccaatgggcttacacccataaggacgctcaatgacatcccaagttgcattagacataatagaatccatctcactccttattgcttccttccaaaagttagcaccaggagaggaatatgcctcttcaatggtacttggggtgtcatccacaagatatacaatgtaatcatcaccaaatgactttacaatccttggtctcttactctttcgagttgatacattgtcatcttccacatgattatgtatatggaattcctcagtgtgttctacataatatgttcatggggtatcattggttcatcactagacgtattatgtatagctttcatggaaattcgtcctcaaagaacatagcatctctggattccataatagtacctaccaacatgtccggtactccagagtttataattaagaacctatatccaatgctgtgaaaagcatacccagggaaaacacaatcaacagttttcggtcctagtttgcgcttcttgttagttagcacattcactttagccaaacaacccatatgcgcaaataggagatgtttaatttcctctttttcattcctcgaatggtgtgatttctttgttctttgtgggaactttattcagaacatgacacgccgtcaagatcgcctcaccccaccattccttagatagtccccaagtctctaacatggcgttaaccaaatcaattagagtttggttctttctctcagcaatcccattgtattgtggtgagtatggtggtgtcctctcatgaataataccatgttccacacaaaaatcagaaaaaatcaactgaaaaatattctccaccatgatcagaccttaacagtttaattttcctcttgagttgattttccacttcagctttgtaggtcttaaaataatgcaaagcttcgtcttttgactttaagagatacacataaaaaatctagtagaatcatcgataaaagtaataaaatatcgtttgcctcccttactcaatattccgttcatctcacataaatcggaatgtattaagtctagtggtgccaagttcctcgcctctgcagccttatgaggcttgcgaggttgcttagattgcacgcacacctggcacttagaacctttgactaaatcaaatttcgggattaaatttaaatttgctaaccgcgacacacaaccaaaatttatgtgacaaagtcatgaatgccaaatatacgactcgttcgaaatcacattgttcacagacttattacaaacataatgcaaagataagcggaacaagcctccactgtcatagctttttcaaacaaatgtgactcgaatacaagtttatagccatctcgacatagcaacgagccactaacaagattctttttgatggaggggacatgctgcacattcttcaatagcactgtctttcccgaagtaaacttcagaatgactgtaccaacaccaagaacacacacatgtgatatgttccccatcagcaaggctccagcccctttgcactgataagaagaaaacaaagaaatatcagcacccacatgaatgttagcaccagtgtcagcccaccactcaggggattgacacactgaaagaacagtaggtaaaatattaccataccccgatgttccttctgcggtcttgctaacaaccatgtttactgatttcttctcttgagctggttttttctcttgcttaaatttgcggtctggacaagcgtttggtcagtgttcagtactcccacaaacaaagcaaccagctcctttgttcctcttcttaaacgaggtttcctggttgggcttcgtggcattctgttgcttgttcttccttttattattatgtgacgcattggagttcttcctttgtaccatattggcactagaagtctcaactccttttccgcgagtgtcttttgctctcgcccgctcctcaacatcaagagacccaataagctcaaccacgctaaactcttgtctcttatgttttagagtggtagcaaaatccgtccaagaaggtggcaacttagcgataataccgtgaaagtgcattcatcccttttgtgagttttggtgatttggatgacaacacatttaaaagactaacaagtttgctaagtgttgaacaggaaattcagtatgatgaacatacttgaatggtgtataatgatcgtgaacaaaggttcaacacaaggttaaataaccagtgcgacaatgcaaatggatataatatgatctctatattggtttaaatatatggacaagacctgagaaatcactacatacatatgatcagaatagaggatgaagtgattaagaggattggtcaagccaaagtgaataagatatgaggaatcgtgaattggcttgaccatattaatatcagtccatatatgcttatatgagaatcaaactagagcttgattaatcttaacagttatatctagaagacattcaagcaaggttcacaatatttaagaaatgattctctcaatggatgctcaaaatgatgtgattcaagaatggcttgatagggtgaagatggcaaggaaagggcttcgaggaactaagcgaaggtgaaggacaagcgacagcttgtagaccgaggtaccatggctaaggtgaagaagagagtacttgcactaagtcgatgaactaatcaactatgaagagttataacatgttgatgcatcagtaaggtgacttgaagccatgatttgaactcatatatgatgatatggtacaagtcacagggtttgagttgcgtttgcttcaaaaggtgagacaaagatgtttgtgatccttatgaagcaacgccatggagaaatcacacatgagacaccaattactcaaggagtttaattaattatattttacttgaattgagtatatgattcatcgtactaccaaggggatccaaaaataaggttggtgtttgccaaagctcaagcctctatattcaaaagctattttttgaaaatcaaaaatctctttaaaattctatggttgactgtggttaggtttgagaaacctagagtgtttttgttgaaaagcagctgagcttttcagctgaactaaactttagctgagttgagcttcttcagctgcagttgagcttttcagctgagctaaacttcagctgtgttgagctttctcaactccagttgaacttcaacttcaactggggtccagtcaagttcaaccggggtccaggcaggttcaaccggggtccaaggcaagttcaaccggggtccagagaggttcaactggggtccaggaaaagttcaaccggggtttagagaggttcaaccagggatgggctgtacgcaacgcttctaagaattgtacgtatgttctctcgtaaccagaagcagcctcacctcctctgtatatataaacgagcagagggaggccaacggatagtaacggtcaccatcagagctatcattacagccagccagaaacggacgccattagtgacgtccgttaatagctgacaagcattatagctcgttcgttactatccataacataggaaacgaccaataatgtacaacagtaatggacggtcatcactttaggcaaaatgtgcaaccgttaggaaggaatattcggaccaaggtccgatctaccacggccacggcccggcggcgcgcgcgtgtggcagtccttcatcattttctcaacttctcaatagatgcaccaaagatccgcctatttaagttgattgaattgtcccttgtacttccgatatggtactaaagtactatacaccgtagcattaaagtgggcctttagcattgactattattgaatattaatttgggttaggccctcattaattcaacggtagcttctaggcctaaccatcccacccccaaactaagcatagatgaactatgtttaggttgctacaaaaatattccaaaaaataattccctccgtcctaaaatattaaccgttttagcattttaatagattcataaaaatatgtcagatccacaagtcatacgaggcaactgtctcgagcatgatggctggagaaccaatatcccccttgtaaaatgtcttcttcctccacttccaatgcatgcaatctatactcaatatcataacagaaaatcccctttccacctccttagctaagataagcctaagtcatcgacaatggcatgataattgtactccgccctgaaacatgcaataacacctctacagaatagaccaaaaactccactcgtaggggaaatactgcccccacggtaagaagaagcttaatcggagccctgatcgagaaaggtcacgaaagatgtacccctccccccatgcaacatgagagtccgccccctataggccagatctttactcgtgctttgagccctactagcccttacacgaggatccgccccataggtcagcccatctcatgtgcacacaactagggaaactagtgagtgaccttgttaacctcagcctaaaattcgctcccaccgggattcaaacttaggacctgaggagtgctactcagacgacctaaccaacttaactagggaccctttcgcacagaatagtccaaggcactctgaggtggaactttcctcattttgatgtactcatcgatggagtcagcaatgctacagtacgcaagcatgcttaggccaattgtgcacttctggtgggggaggaaacactgcggttgaatgcatcggttcaaaaagtgaagtatgggaagtgctcacccaatctctctaagatatgaaggaagagacttctctggatgcggtaactttgacaaaagtagagcagtgggtagacacacaggtcgttgaaatggtcttgcattaaccggtcgtatgcagctacatagtcgcagtcaatgtatctctgatgttgccttggccgcctcatcgacctaggagactcggatgcaagctctgacgcctgttgcattatattttgttgtaataacttgaataactcttttgagtcatattgatgtccaagctgaacgaaaacatcacaacaatgcttgatttgactgaaacgagtgtaagaggattataaggggtggtagagaaatttgaagtgtgggttgtgtgaatgagatcaaacactcctctatttatagaccaagttctagtttttttatttttgaaaaaaaatcaaaataaagcgaagcaattagaacttgccacatggcaagaggcgatcgttatcgacatggccgcaatagctgttcagtaccaaccagtcagtatcgaccgacgcggtcccaacacggtcaatagtaaccctggcggccgatcagtagcctcgacaaccacaagcgaggctattagtgctggcaccatgtcgggtgatactgaccattcagttgtgccacatgggtgggtgggcagtagagccaagcgccggcactcgcctaacatgatctaaaacaatcgataaaactgacagattggttgcggttcatgactacctagacctggtcgaccacaagtagaaaatgagtcgagccgagcttgactcggctcgtccatttcacgagctagagagttaggctcggctcagctcgaagtcggctcgcgagctacaccccgatatatattatttcattatatagtaaattattaatatataaacataaaatataaaaatattattcaccattatgaattatcttatatttatcatcaaaggctaagaaataagccgactatctataaattatctaatatccatcattattctacatattgattaactaggtgtgtgcccgtgcgttgcaacgggagtacgctagtgtcggggaccataattaggggtacccccaagactcctaaactcggctggtaatcaccattagcacaagctgcaaaagcctgatgggcgcaatttaggtcaaggctccgtccactcaagggacacgatctcgtctcgcccgagcccagcctcgggcaggaatagtagacccaggcggattcacgcctcgcccgagggcctcctcaagcaacaggcgcaccttcaactcgcctgaggcccagctcgggcaggctttgcagtgaagcaaccttggccagatcgcctcgccaaccgaccgtatcgcaggagcattcaatgcaaggatcgcctgacaccttatcctgacgcgcgttcctcagtcggcagggccgaagtgaccgcagtcacttcgcccctccactgactgacctgacaggaaagcagcgccgcctgccccgctccgactgctgtgccacccgccagggtgaggctgacagcagccgagtccagcctcatgcgccataggaagctccgcctcgcccgaccctggggctcggcccccgcctcgaccttggaagacggtgtccgcctcgcccgaccccagggctcggcccccgcctcgacctcggaagacggtctccgcctcgcccgaccccatggctcggactcaaccttaacctcggaagacggtctccgcctcacccgaccttggggctcggactcaagctcgaccttggaggagtcaccacctcgcccgaccttgggctcggaccgaccacgttatagggggtacatcattaccctacccctagctagctcaggctacggggaacaagaccggcgtcccatctggctcaccccggtaaacaagtaatgatggcaccccacatgctcccatgacgacagcggttctcagccccttacggaagcaaggagacgtcagcaagaacccgacagccccgacagatgtgcttctatagggctcaagcgctcctccgacggccacgacatcacatgcacagggcactaacacctcaccgacagccacatcggcatgtacatagggctctggctcctctctgccggacacgttagcatactgctacacccccattgtacacctgggccctctccttacatctataaaagaaaggtccaagaccctcgtacgaggaggtggccgcgcgggaggacgggctgacagacaggctctctctctccctcgcggacgcttgtaaccccctactgcaagaaaatcaatttctatccatttttagaaggttaaatggtccaccaaacaatttatttttctcaaattctccgagcatttactgcaccccttttaatcattgttgagtttctgtggttagaagtgtgtagtaaatattataacgtgcttttagaaccatcttcagttgatgaatgcttcagtcgattaaaagtagtatgatcttttctatgtcgtactaacatattctaaattttaaaatgaaataatgaagcaaaatgtcattttgtctcaaggaacctggaagcaagaacaagattacatcatattaactcaagatgacttggtgataaactgatacttgcagataaggaagaaatgaatctcaacatgagctctccgatcaaacgatgttcatttactgcaatctgaaggttcgacattgttcacaaccattaccatccaaatccaagcaaccgaaacctattttaggcttactgcttcaattatacacagacaaaacccgacagtaccatgttggagacgtcatactggtcacaagtctaataacattagtgacctcaaatctccaacaaaacaacaaattaaccgctcgcattaatgctttgtccttcagaccagtatggctgttgcaatttagcgacgaactggcacaatctgctcttgcaatttttcttcggtcagccccactcgcattaatgctttgtccttcgatggttactgagaagatattcattgcagtatttgttgtattcatacattcaaatttggaacaaatatgttattgttgccctagttggagcaccagacaagttatccctggtaggccatgtaacatagtgagaagctaatatggaagactggaagtgataccatactttggcctagtgatggtgcaattgcattacaggatttacagcataagcggcaaaggaaagaaaactaaaacatgcttcaattgcttaccccctattagctgggactgaaagaagatcagcttgtactgcacacatggagaagtcagtcattgtacaaacaagtccaacaataggtaagctaaccaacctgtaacaatttttagtagagagtctagcttaacagtcacatcattccgaaatatcctaactactcgacagaggtagcccttcaagggaccctttctaatgcgcagcatctgcccaatagagaaaagttgttctctggtgctcctgtaaggcccttcagctgtattatgaaggaaatcagaacgatgtacttacatgcagaaaatattacagaagaaaacaagaaacacttactttttatcctagaatatatgttgtatcctagaagagaatttcaaaagctctgtttctgtcggttgtatcccccaataaatcaaagaactaagtgcaacttttttatacagaaatccatccttgaacatcaaaccatcaagtacttcaaaaacttcgctagtctgacgatcgcgctttatttcaatgtgaggcctgaagaacctgcatgacaaataacagtttggaaactgtgtcaagactggttaaaataaaatagaagcttaatggatgtaggacaaggaagctttcagaagtaaggaaaaaattactcaagttcttgggagctgatcaaccgtggggtaggaactgtagcttcttttagtgaaactgcaccaccctgcaaagaccaaaatatgaagataagttaagtaataagcaacacaaggtaagcttgtttttttgcccaggaacacacctaataaaaatagttgagtctagcaaaaacactgttacaagattaaaacaagagctgccatccacgtatttatttctcttggtgttttgattagttccttacacctaaaatcatcctaggacctatcagaccagttaacatgttaacatttattttctaaaaattagcacgctttttatcagggtgccataaggaaatcagtttgacagcgcgaccgcgtgggccgggaccgcgcgtggggaccgggagcgcaagcgtggacagcagggaccgatgagtgcgccggcggacaggctacgccagggatcgcgccgccgcaggggctggcgtttgccggctggggagcgaggagtttccgctgtcgccacgaggaccgaggtattaactgccacttgtttggcttaccagaactcgtggggcaggggaggggggcgctggcgcgacagcattcatggaggttgagggggtaggggcgcgaaacttcagacatcatggacacagacgcgacgcgggggcagcaggggcagcagacgcgacattggttgttggcggcgtggaaagttggagagccgacgcagatggagcgcgtggactgcgatgcatggcggaggcgatgctagtaggatatgaataataaaaggaaaagatgaccagtcagaaatacgactgttacgttaaataacctgtgtgagacaagctcgccaccacccataattatcctttgacatctcctcccagttatatgtaggaaaaccccaattttgtccattcttgtcaaaataatcaagaggcgctccagtagtggtattcatgcgaaacaaggttggctatacccaagtatcgacactattcctatcaacaccaataggtaaatcacctttcaggataacatttttctttcttgcatatgttgctgcctcagataaataaaaaaataatgtcaaaaataaatacatgagagtagtactatgagcagttcagaacgacaatacaacaacaggaaatacttacttgtatatatagatggtactgaacatagtaatgaaaacgtataacatcatggtgtaaagtaccttcagaaataagtttgtcaagctgaaacacattacaaagggaaaccatcttagtgctcataaacatgtgctctcataaaaaaaatagaacaacatgttcttagcaagctatagtgggagaaaagatacaagtaccaaatgcagaataatattctgaataccttatccttggaaaactgagaaaacgatcccattgactgtgatcagaagtcccgcaaaaagcaaaatgcctcatatggtttcaaccattcctattggagcagtgtgaaagcttatcacatacagtttggaataggaaatcaagtaccatgattacacatgagaaacgaaatggcagtgaatgtacctcgttttcagataagaactgctggaaagaactggagtttagcactttttccttttctaaattgaatatttttctagcaatcgacaattttgtggacaatgctgcctcgtagtcgacatcctaatttacatgtcatttccaagttaagaaataaccaaacattaaagatttactcagagatctacaacagtcaaagacaacatgcaaatgcaataacctttttatccaattgcttctttgcctcctgaatttcttcctgtagtaaattttaaattgggtaccaaacgaggtgagtaacaaacatttagtggaataaaaataacacagccaagacatacaatgaataaatttgaaagcataacaaaggtataccttaacacaggaattgcatctgaaagtgcttgtaccctcaggtacaagggatgcaaagcaaacacagagagggagctgtaattcacaaatgaggggcactactactgtttagataacgtccttactgatttcaagaaaaacaaccattatgagcaggaaacctttggtatcgaatattagttatacctgtacgaataagaatcccacctcatcccatgaactgaagtatcgttgattggaaggagctgaacaagatggaagcccaaattgactgcccagtcaacaagaagtttaagatctagaaattctccaatgccaaggtcctcatctgatctgattgaaaacatgggtacagcaacacctgcacccctccatggtgcatcctggtaaatgcagatgaagtattagtacacaatttggctgtgtatgatgcattgatgcatactgattctctcctgctccgtttgcccagcacctccagctacgtgctgcccttcagagacaagcattgggatgactgattttggccaactgaagcgacgcacgcacttggcaagaagagcagcagcgacgcttggtccacggccggtggccgcactcgacgggagagaatcagcacgacggcccaccatcgtcccggcacaggaccttggccgccgcgaagtagtccttgacggtcacggagccaaagccgtcgtcgtagaggacctccagccctctcctgctcctccttcaccggcagtccctcgttgtccttatcctcctccaccttctccttcctctccaccgcggcccctgcagacccgttcactgtcatcgtcactgtcgccgacgcgtcgagggagctcgtgcggagggcgaaccgcgcctggagtcgggcgctgcggtttgttttcatgaccgagacgcacggcgatggaggcggaggttgttgagagcgggcgtagcggggattcatcgcgggcggttggggaatcgcgtcgggagggggcggtcgtgcgcgtgatccgcgggcggttggggaatcgcggcggtggggggcgaggggaatcgcagcggcggtcgcgttatccacgggcgggatgggcggtcgtgcgcgtgatccgcgggcgattggggaatcgcggcggtggggggcgaggagaatcgcagcggcggtcgcgttatccacgggcgggaggggatgcggcgggggcagtctatactgcccccttaatagttagtagagatttggtacaactcacgagctagctcgctcgcagacgctccgaacttgatctgactcgtgagcctcaagttttttttctagccttaaccacatgcccacgaggatgattgttcgaggtgattagcaaacgcaaacgatatcaattgacattttttattagtttcattaggtttagagataaaattatatcatgtatgtcactcatctagtatcttatttgttatcataaatgttctaatcctttttacgtcacccgaatacaattttttactctttcatgtcatcgttgatgacatagtaagggactaagacatacaacattttacatttaacatttggccacgacatgtaagagtgagatattgaattcgagtaacatacgaggtacgatgaataaggtattacacaaaattacagtggcatatagtgaattgaattgttctatttttactttttttttgcctaacataaagcctattttatttagtactttctctgattcagctttaatttttatgatttattaattttattatatatctatatattgtatagattaaaaaataaaatagattatagatttaggaaaaattacattcgggtgatttggctgttgggtgttgcgttccctacttgctcttttcttcctccgcttcaacctgtccccagcgccccccgcgcacacactgtctttctctgcctttctttccctagcgccgcgccggcgacgccattcgatcaggccgcttcgccggcgacagcatattccaggtatgccgtcccttctgctccttctgcgagaattcaaacaccccgaactccccaaatctagtatttgtattcggatctgaccatttttcactgggcccgcccctgattcgcaggtcggttggttttggcacttcggaccggcggccatggcttccgacggcatcggccccagaggtattactgtttcatctcttcttgtgttcaaacagacagacgtcaagccgccgagaggaggtacaaatatagattttgggtaatgagcacgccattgcgcttccagcgatctgacatattgggaattcttgcttttttttgggtaccttgcaaggccgaaatttgacgcttttctgtttaattctagtgcctgtctgcatccattagggcatcctagctgctccatgctcgtgatctcgtccgtttgcttgattgaatccattgttttccaaagttcattgctactgcgaaatacgtttatatgattaccacaagttgtgttttttccttttcgggttgcacagagggtactgccatcattgttgttatagcgccatttggaacaagtgattcactggtactagtacagtatgtgcttttcatgtgtgtttggtttgtaccatcagatggaattttgagcgcggtttacaaattagtactatagatatactgtgaggtgcacactagatggttctgctttgttctacagtcagtaactttttcttccttgctcacagatgtatgtgttgttggggttgcacgcaccccaatgggcggtttccttggtgccttgtctcccttgcctgctacgaaacttggctctatagtaattcaaggtgagatccgaatcttctctgcatttacatccgagctctgaacatggtcatggctgggggctgttagctgctctggaaagagcaaacgtggatccagccctcgtgcaggaggtctactttggaaacgtcttgagtgctaatttggggcaagcgcctgcaaggcaagctgctctgggtgccgggataccaaactctgttgtttgcaccactgttaacaaagtctgtgcatctggcatgaaaggtttgaatcgaatttatctgtctgtccttgtgtactctgctcagagttcacagaagtgagagattacctgaccatgctcttgtttccctttcctatatgcagctactatgtttgcagcacagtcaattcaattgggtatcaatgatattgttgtggctggtggcatggaaagcatgtccaatgccccaaagtacattgctgaagctaggtatgcaattattacttggtggatatattcaatatcgagctgcataaaccaaatgatagtcttaagttatttggtagatacatgcatgcttacttatcttcattgcattttctaaatttgtttgtaagaaatgttgattcaccagcagcgaggctattaacgaagtggccagttttgttgtgaaagtatattctgttcatgtttaaagtgcatttcaactgctttaatccaataagcttgctacttacaattgcaggaaggggtctcgttttggtcatgacacacttgttgatgccatgcttaaggatgggctttgggatgtatacaatgattgtgccatgggaatgtgtgccgagctttgtgctgacaatcatgccctcacaagagaagaccaggtctcttaatacagatagcagtaaatgctgtttgttataatattcccatatttttcaagatataagttgtgctatacaacatgtcaatgctggcaattattttgagagtgccctggaatcttcgtgctttatcttggttatcatcataaatggtctagagactctagaccagcatctgcattccttgtccgatgaactagtaacttggatcctttctggcaatgattttctgttaggttgtgacatgattgatagggtgggcttatgcatgctctgggtctgtgaactgaccattcatttgcttccagagatgaaagtagatgtgccacacaaaaatgagcactcttttgcattcttgttagagctatacaagtataatctcttaaaagctgctcatcagtacatgacactagtaccttgatgattttactgtatctgtttatgtaatttttttcttaataaatttgatatagtataattaaaattgagttgcctttgaattttcacttatatgttgcaatgtatttttgtctatattgcaataaatatattcccaatttctggtatatttacttattcttgaataggatgcatttgctatccaaagcaatgagcgtggaattgctgctcgtgacagtggtgcttttgcatgggagattattccggtaattttctccctcattgatgatactagacatgcttttcttggttttctgatggtcaatgttgtcgcccaggttcaagttcctgttggtagaggaaaacccccaacattaattgagagagatgaaagcctggataaggttttttttctgatttgacaaaatatttttaacaaaataaagcttgtagttgatcaaaggcaaaaagactggcaggcactttgatttattgttcttgcttcctccaaatgcaacgttcctcgcataatgagctttgctagcagttatttgtaagatcaatgcatgacagttttatttatgtcttgtgctattccttttgtgtcttagtttgacccagtaaaactaaagaaacttcgcccaagtttcaaggagaatgatggtacagttacagctggaaatgcttctagtataaggtagctgcttgaaatatttctgagacctttttgtcctacaaagtctttctgagaccttgtttttcggccatatgttgtttagctgacagatatgaaggacaacctatttcattgttgacagttaaattatattattgtattatgcatgcatttttaactgatatattatgcttgcattttgtcaacttcattgtttctctatttgtttttagactgcttgggtatgctctactctgtgaaatagatggtaattttttctttagaattggtacccaatcgatgtgaatgatttatcacataagaaagtaaaaacattttaaatgccttattatgcccattcaaacaacaaaagttgccctagaccttgtctgtctcactttgtactgtgtctatttttagctgaccagtactgtccggtgtactgcctactatggcttgtctagccttctgcaaccagtcatatctaatttgttttatatggatcagtgatggagctgctgcattagttttggtgagtgggcagaaggctcaagagcttggccttcaagtccttgcaaggatcaaaggttatgctgatgcagctcaagtaagccacagtaacaattgttagctctcctaagagtagaatgcgcttattctaattcacattgtgatctaaatattttaggatataggaagttatttttatctggaacgattttatgttactattttagatatcgaaatttatcaactattggaacttgtgatctggaatattattttgtaatgtggatgctgtttatacaggctccggagctttttacaaccactccagcacttgcaataccaaaggctatcgcaaatgctggattagagtcatcccatgttgatttctatgagattaatgaagccttttcggtatgcattgggtttctttatttgtaagccttttgttatgcattgagagcttattttacttattactttttttttgtaataatgtcttttttacttatcaatataggctgttgcacttgcaaatcaaaagcttcttggaattccttcagtaagtgtcacctgtattaaactgccattctttgtgcattttagaagttaaaacatcactttcagaaagtacatattggcccttttttgttatttgctatgcagcagcaacatgtaattgcattataacagcattatatgtactaacaacatatgtgtttgcaggaaaagattaatgttcatggaggagctgtatctttaggacatcctctcgggtgcagtggtgctcgcattttggttacccttattggtgtaagttctatcttaagatgcttgttttatcttttgagttacaatcccttttgtttaaaaaaatgtgcaatgtttttctagtaaaaaaatagatgatggtctttgagtaattgatgaattctgacatatgttaccgtatcatcatagggttcgtgatgaacagtaagcatcttcactattgctactaagtctacttccttagtgttttccaatgtgcaatgtttttcttgtataaagctgcaaatgtagagtttcacttgttgctggtgatcagtagtttctcttcattttctttaagcaaaaccttgagaacaatatggtgccatcatgttgggacatcaaatatatggtgcttgaccctcctaatcattgtttcttgttaacaggttctcagggcgaagagtggcaagatcggagttgctggtgtctgcaacggtggaggcggagcatcagctcttgttctggagctcgcataagaaatctagaccttgtaaggctcaaaacaccgaatatatctcaactcaaattgattcttttactagctggcaggagctaaccagtataaggtgctattactgttgtgcaatttgactaactgctgcaactgatattgcaggtatttagcaaaagttccctgaggtgatcttgtagtcttattttccgttgtagtagtctttccagcacagtgggatccgaagcttggaattcac

SEQ ID NO: 2 - DNA, 138774 bp, Zea mays
caagtcacgtgaattccaagcttcggatcccactgtgctggaaagaaggtgccctcttggagttgcttcacttgaaatcccaagaagtacttcaactcccccatcatagacatctcgaatttctgtgtcatgatcctactaaattcctcacatgtagattcgttagtagacccaaataataaatttggcatacaaacaaatcatttgccattgttttagtaaataaagtaggataggcctttccgactttgaagccattagtgataaggaaatctcttaggtattcataccatgctcttggggcttgcttgagcccataaagcgccttagagagtttaaatacatagttagggtactcactatcttcaaagccgggaggttgctcaacatagacctcttccttgattggtccattgaggaaggaacttttcacgtccatttggtaaagcttaaagctatggtaagtagcataggcaagtaaaatgcgaattgactcaagcctagctacgggtgcataggtttcaccgaaatccaaaccttcgacttgtgaatatcccttggccacaagtcgggctttgttccttgtcaccacaccatgctcatcttgcttgttgcggaaaacccacttggttcctacaacattttggttaggacgtggaactaaatgccataccttattcctagtgaagttgttgagctcctcttgcatcgccaccacccaatccgaatcttgaagtgcttcctctatcctgtgtggctcaatagaggaagcaaaagagtaatgttcacaaaaatgagcaacacgagatcgagtagttacccccttttgaatatcaccgaggatggtgttcacggggtgatctcgttggattgcttggtggaatcttgggtgtggcggccttggaacttgttcatcttcctcatcttgatcatgggtatctcccccttgatcattgctctcctcttgaggcagctcattatcttgatcttctccttcatcatcttgagcctcatcctcatcttgagttggtggagatgcttgcatggaggaagatggttgatcttgtgcatttggaggctctttggattccttaggacacacatccccaatggacatgttccttagtgcgacgcacggagcctcttcattatctagctcatcaagatcaacttgctctacatgagagtcgttagtctcatcaaacacaatgtcacaagaaacttcaactagtccagaggactttttaaagactctatatgcccttgtgtttgaatcatatcctagtaaaaagccttctacagccttaggagcaaatttggattttctacctcttttaacaagaataaagcatttgctaccaaagactctaaaatatgaaacattaggctttttaccggttaggagttcatatgatgtcttcttgaggattcggtgtagatacaaccggttgatggcgtagcaggcggtgttgaccgcctcgggccaaaaccgatccaaagtcttctactcatcaagcatggtccttgccatgtccaatagagttctattcttcctctccactacaccattttgttgtggagtgtagggagaagagaactcatgcttgatgccctccacctcaagaaagccttcgatttgtgagttcttgaacttcgtcctgttgtcgcttcttatcttcttgattctcaagccaaactcattttgagcccgtctcaagaatccctttaaggtttcttgggtatgagattttacctgcaaaaagaacacccaagtgaagcgagaataatcatccacaataactaaacagtacttactcccgccgatgcttatgtaagctatcgggccgaatagatccatgtgtaggagctcgagtggcctgttagtcgtcataatgtttttgtgcggatgatgaacaccaacttgcttccctgcctgacatgcgctacaaatcctgtctttctcaaaatgaacatttgttagtcccaaaatgtgttctccctttagaagcttgtgaagattcttcattccaacatgtgctagtcggcgatgccagagccagcccatgttagtcttagcaattaagcaagtgtcaagttcagctctatcaaaatctactaagtatagctgaccctctaacactcccttaaatgctactgaattatcacttcttctaaagacagtaacacatatatccgtaaaaagacagttgtaactcattttacataattgcgaaactgaaagcaagttataatctaaagaatctataagaaaaacattggaaatagtatggtcaggtgatatagcaattttacccaatccttcgaccaaaccttgattcccatccccgaatgtgatcgctctttggggatcttggttttctcgtaggaggagaacatctttttctcccctgtcatatggtttgtgcacccgctatcgatgatccaacttgagcccccggatgcataaacctacaaaactaatttagttcttgattttaggtacccaaacagttttgggtcctttgacattagatacaagaactttgggtacccaaacacaagtctttgaccccttgtgcttgcccccaacatatttggcaactaccttgcccgatttgttagttaaaacataagatgcatcaaaagtcttaaatgaaatgttagaatcatttgatgcaataggagttttcttcttaggcaattttgcacgggttgattgcctagagctagatgtctcacccttatacataaaagcatgattagggccagagtgagacttcctagagtgaattctcctaattttgtgctcaagataactggcagggtacaaaatgtaaccctcgttatcctgaggcatgggagccttgcccttaacaaagttagataatcttttaggaggggcattaagtttgacattgtctcccttttggaagccaatgccatccttgatgccagggcgtctcccactatagagcatgcttctagcaaatttaaatttttcattttctaagtcatgctcattaattttggcattaagttgagctatgtgatcattttgtttcttaattaaagctaggtgatcatgaatagcatcaacattaatatctctacatctagtgcaaatggaaacatgctcaacggtagatgtagagggtttgcaagattttagttcaacaatcttagcatgtaaattgtcattttcatttctaagattcgaaatggtaacattgcaaacatctaagtctttagccttagcaattaatttttcattatcatttctaaggctagcaagagagatattcaattcttcaatcttagcaagtaaactaacattatcatctctaagattgggaattgaaacatcactaacattagaatcaaccttagtaattaatttagcattttcatttctaaggttggcaataatatcatgacaagtgcttagctcactagataatttttcacatttttctacttctagagcataagcattcttaaccttaacatgcttcttattttccttaattaggaaatcctcttgggtgtccaagagttcatccttctcatgaatagcactaattaattcatttaatttttccttttgttgcatgttaaggttggcaaaaagtgtgcgcaagttatcctcctcattttcactagaattatcttcatcactagaggatgcatatttagtggaggatcttgattttaccttcttccttttgccgtcctttgccatgaggcacttgtggccgacgttggggaagaggagccctttggtgacggcgatgttggcggcatcctcgtcggaggaggagtcggtggagctctcgtcggagtcccactcgcggcacacatgggcatcgccgcccttcttcttgtagtatcttttcttttctctcctcttgcccttcttgtcgtcgcccctgtcactgtcacttgataatggacattttgctatgaagtgaccgggcttaccacacttgtagcacactttcttggagtgggatttgtagtccttccccctcctttgcttgaggatttggtggaagctcttgatgatgagcgccatctcctcattgtcgagcttggaggcgtcaatgggagtctacttgatgtagactcttccttcttctccttcgtcgccttgaatgcgaccggttgtgcttcgggcgtggaggggccatcttgctcgatgattttctttgagcctttgatcatcaattcaaagctcacaaattttcctatcacttcctcaggagacattagtgtatatctaggatcaccatgtattaattgaacttgcgtagggttaagaaaaacgagtgatctaagaataaccttgaccatttcatggtcatcccattttttgctcccgaggttgcgcacttggttcacgaaggtcttgagccggttgtacatttcttgtggctcctccccttagcgaagccgaaagcgatcgagctccccctcgattgtttcccgcttggtgattttggtcacctcgtctccttcgtgcgcggtcttgagtatgtcacaaatctctttggcactcttcaatccttgcaccttgttatactcctctcgacttagagaggtgaggagtatagtggtggcttgggagttgaagtgcacgatttgggccacctcgtcctcatcataatcttcatcccccacggatggtatctgtacaccaaactcaacaacatcccatatgcttttgtggagtgaggttaggtgatatctcatcatatcactccacctagaataatcttcaccgtcaaacgttggtggtttgcctaatgggacgggaagtaatggagtatgcttaggaatgcgaggatagcgtagagggatcttactatacttcttgcgctcttggcgcttagaagtgacggacgcggagtcagatccatatgtagagggcgaggaagagtcagtgtcgtactagaccactttcttcattttcttcttcttctcgccactcttgtgcgatcgaatgcgtgaaggggatccatccttcttgttgttgtcggactctcttgatggagccttcccgtggcttgtagcggacttctcaccgccgatcaccatcttcttagcgtgatctcccgacatcacttcgagcggttaagctctaatgaagcaccgggctccgataccaattgaaagtctcctagaggggggtgaatagggcgaatctgaaatttataaacttaagcacaactacaagccgggttagcgttagaaatataaatgagttcgagagagagggcaaaaaaacaaatcgcaagcaaataaagagtgagacacaaggatttgttttatcgaggttcggttcttgcaaacctactccccgttgaggtggtcccaaagactgggtctctttcaaccctttccctctctcaaacggtcacttagaccgagtgagcttctcttctcaatcaaacaggacacaaagtccccgcaaggaccaccacacaattggtgtctcttgcctcggttacaattgagttgatcacaagaaagaatgagaaaaagaagcaatccaagcgcaagagctcaaatgaacacaagtcactctcactagtcactatttgatttgaaatgaactaaggacttgggagaggatttgatctctttggtgtgtcttgtattgaatgctatagctcttgtaaggtgtaggaagttggaaaacttggatgcaatgaatggtggggtggttggggtatttatagccccaaccaccaaaagtggtcgttgggaggctgtctgcgttggattctcaccgttggagcttctgtcttctggggcaccggacagtccggtggtgcaccggacaggcactgttcagtgtccggtgcgccacccgtctctgccctgactctggcgcgcactttagcgcatttaatgccttctgcagacgaccgttggcgtgaagtagcctttgctccgctagcacaccggacactctctggtgcttcaccggacagtccggtgaattatagcggagcggcctccagaattcccgaagttgagcagttcggagttggagtccctggtgcaccggacactgtccggtggcacaccggacagtccggtgcgccagaccagggcacactttggctgactttagctctctatatttgaatcctctctcggtctttttattggtttgttgtgaacttttggcacttgtagaactcataatctagagcaaactagtcagtccaattatttgtgttgggcaattcaaccaccaaaatcaatttaggaaaaggtgtaagcctaattccctttcaggtaccttgaggaggaaggcataaagaagaagactaggaggaataagaaggtccacaagaggcacacccttgagtttgcaccatcatccaaagagatcatccggtgtacatgatcctaagggacatcaacaagggagtaactactcgatctcgtgttgttaatttttgtgagtattactctttatgtcatctattgagcctttcaggatagaagatgccttgaagggtcaagactaggtgatgcccatgcaggaagagctcaacaacttcaagatgaatgaagtttggagagtagtgcctcgtctaaagcaaaacattgtgggaaccaagtgggtgttgcacaacaagaaagatgaatatggagtggtgacaaggaacaaagctcgacttatggcaaaaggttatgcacagtttggactttgatgagacatttgctcttgtagctaggttagagtctattcatattttattggcctatgctactcaccattactttaagttgtttcaaatggacatgaagagtgccttccttaatggactgatcaaggaggaagtctacatgaagcaaccacctggcttcgaggacgacatgtatcctgatcatgtatataagctctctaaggcgctctatgggcttaagcaagcaccaagagcaaggcatgttgtgctggtgatctttttgtatgccaaatatatgtcgattacataatatttggttctactaatcaaaagtcttgtgaggagtttagcagattaatggtgcagaaattcgagatgtctatgatgggcgagctgaactacttcctaggatttcaagtcaaacagctcaagttcaacaccttcatctctcaaaccaagtacatgcaagacaacctcaagaagtttagaatgaaggatgcaatgcccatcaaaacgccaatggggacaaacgtacatctagacctcgacactggaggtaagtccgtagatcaaaaggtataccagtctatgaatggttccttgcttcatctttgtgcttatagactggacattatgcttttagtttgtatgtgtgctagatttcaatctgaacataaggaatgtcactgtatggtcgtgaagcaaattttaaggtatttagttcatatgcctcaagttgagctctagtatcttaagggtctacctttgacctgattgggtactcagattccgactatgccaggtacaaggtatataggaagagcacatgaaggacatgtcagtttttagggaggtccttggcgtcctggagatctaaaaaacaaaattttgttgccatatccaccaccgaggccgagtacattgccgcaggtcattacgccgcgtaattgctttggatgaggcaaactctaagggactttggctacaatctgagcaaagtcccactcctatatgataatgagagtacaatccgcttggtagataatcatgttgaacacagccgcactaaacacaagacatccgacatcacttcctgagagaccaccaacaaaggggagatatcgatattaaccatgttagcaccgatcatcagttagccaatatcttcaccaagcccttttataagaggaggttttgtgagttgagtagtgagttaaatgtattatatttttggaacttggattgatttatagcatacatcttttatatgcctttgatcatgttgatttgtgttttatttcataccattgcttattttaatcaagaacaggggaagaaatttggccttgcataattcagcttcgcgtcgtaaccaccgggtcgctggagttggggtagaattcaacattcaagaactgggcagaagatctacaaaacgagtaatgaaagctttaaaagtagttggagaattggaggatattagccagcaagctatggaggattatgctaagcttttcgtgcatcctctctcccaaactcacgtggaagctttggcggccctgtttggatggtctactccagtcgatttttgtgcagattagtagagtgaggacatgttgttcttcctgtattaatggatccagaaaaaatcttgatttggaatgtaaggggtttaaactcctctgctcgccagaattcggttagggagttggtgtcctcttcacgagcggacattgtgggtgttcaagaaacaaaataaactgaagtcccgcgacgaaccatgttgtccatgcttggatcagatttttcaaattttctggttctaccttctcttcgagctagtggtgggattttagttgcctggaaacatcatctgggagcacaggccttaacagaattgatgatcacagtatctcagtctagttctgcacacaagaggggcaagcctggtggctaacttatgtatatggaccgcagagtagtgaagaaaaagttcagtttctgcaggaactaagaaatgtcagagcagcttgtcttggtccatggataattgcaggggacttcactctcatctacaaagctgaagactaaaacaattctaatcttaatcgcgcaatgatgggtcgctttagaaggaccattgatgatttatctcttaaggagatcccccttcatggacgcaaataaacatggtccaaccagcaaaacataccaaccttggtgaagctagatagagtcatgtgttctactgattgggaggacttgttccctaatgttttgttgcagagttcagcttctgaagtgtctgaccactgccctttactgcttggtcttcgggataacaggtcaggaaagcaaaaattccatactgaatatttctggccaaagctagatggtttccaggaggctgttcaggatgcatggaactcaatccctgctttggagtgtcctttccaggctctagacatgaaatttaaggcgacagcaaaaggattgcaaagctggagcgatagtagagtgggacatgtgaactcccaacttgccctagctcatgaggtgctgcataggttggagattgcacaagatgctcggtccttatcgctaagtgaaatttggctcaaaaataaattgaagaagcactcccttggacttgtctcattaaagcgcaccatcgcccgtctaagatctagagtttcttggctcaaagaaggtgatgctaatacgaaattgtttcatatgcatgcccgtcaccagaaaagaaaaaaattgtggcaagattggttgctgacaaccaggttttcactagacataatgagaaggccattctaatggatcaattctattccaatctgctgggtgtcagcattgatagagattgctctatcaatcttgaagctgtgggagttccgacctttgatttggctgctctggacttgcctttcttggagaaagaagtgtgggaaacagttaaattgctgccttcagataaggctctgggtcctgatggtttcacaggaggattttataaggcctgttggtctataattaaagtggatataatggcagcagtttcagcagtttggagcaggagatttgcgcagttcaataggctgaacacaacatacatcacattgatcccaaagaaggagggggctgataaagtaaaagagttcagaccaattagcctggtgcatagcttcgcaaaattgatcaccaagctgctagctaatcgcctagctggaaggttaaatgagatgatttcacccattcaaagtgcttttataaaaggttgttttattcaggataactacatgttagttcagcaaactgcaaggttcctccatcgacgaagacatgcccattttcttctgaaattggacatcacaaaagcctttgattctgtctcctggccttttctcatagagagtgatggtaaatgggtttccgggcaaacttattgttcatcgtcaaggactacgacagggtgatcccctctcactgatgctcttcattctagtcatggatgtgcttgggcgaatggtcactgcagctgaaggggcagtacttcttcaaccccttgctacaagatctgtgcatcatcgagtctctatgtatgctgatgatgtagtcctcttcttgcgaccaactgcgaagatatagtaataattgtggatattcttcacctattcggcgaggcttccgggctgcataataatgtccagaaatctaatgtatatcccattcgttgtgacgagagtgacattgcagttgtgcaaggtttgctgccgtgtggaatttcgtccttcccctgtaaatatcttggacttccattaacgctgcgaaagataaccaaggaacaggcgcaaccaattatcgacaaatttgcaaatcagcttcctggatggaaggcagacttgatgacaagggctgggagaacagttcaagtgcggtttgtgcttactgggattctcatctacttagcaatggcaattgatctcccaacttatatcacaaaagcaatcgataaaatccgaagaggcttcctttggagaggtcgcaaagagattaatggggggcattgccttgtttcttggagcaaagtttgtcggcctcttgatttgggtggtcttggtatttcaagcattaaggagctgagttgggcgctgcggatgcgttggttatggctgcaaaaaacggatcctaaccgaccttggtcatccttgactatccaagttctggacaaggtccaggccttcttcagtatggtgatgcaaacggaagttgggaatggtgctaatactattttttggaaggatcgatggattcaaggacagagggtggcagatattgcgccaagacttcttcaagttgttccgaaaaagaaaaatcaatacaaggacaatgcaagaagctattactggaagagcatggatgtcggatattcgaggggccctatgtgtgggggcaattgttgattatcttcacctctggaacttactgttaactgctgaattaaggccgaatgttgaagataagcacattttcaagctggctgccaatggaaaatattcagcgaaatctgcctacgaggggtttttcattagctcgattccttttgaaccatacaagaggatatggaaaacctgggcgcctcctaaatgtcggttttttatgtggttagttgctcaaaaaaggtgttggacagctgatcgtcttgcaaaaagaggattggatcaccctgatagctgccctctttgtgaacaagaaagtgaaacaatagaccatcttctggtcacttgtgttttctcaagggagtgctggttccttttgttgagacaatttggactgcatactctgtcccctcaaccagaaaatgacagtttcctggactggtggaggacagtaagtgaaatggcagctggacaaatgaagatggggattaactcccttgttttgcttggtgcatggaccttatggaagcaccgtaatcaatgtgtcttcgagggcggcaatccgagggcttattttcctagcagttaaccttcctcatggctaatttctgttcaaggttttgttgttttttttctgttttttgagtttaaacctcagtgttatggtttgtaagggcttcggcccgacttttttcttcttcttaaatataatgatatgcagctctcctgcatattcgaaaaaaaagttatagaatgtcatctctggacctcaaaattccaattgtaatgatgtacatgtttagtgagatatgagcatgagcacaagtccacttgaaggcaatttgaaggtttcaagtccaaaagagctgaaacaaggggcttggaaatgcaaatgggagtaaatagtaaatatgtgaggtttggacccttagacatgttgcataggcctattacaatgtttctagcatttgcatttggtctctaactccttttgtagcaaaaagtgcattttggacttggtttgagccaattcaggaactctattgaagatttgtgaaagaggtgagtttctcacacttagtcaattggattatgtgctaattatgtctaagtcgtagggaagctcccaaggacaaccaaaaagaattggagaagattggctcaaaagagcctaagttgggatatcctaggcctcactggaccggtttggtggcacaccggaccgagtccacaggggcccgagacttaagagttctggtggcctggcgtactggaccgcttgtatggctgaacagtgaactcttgagaattataatttataattcattgggccttcacttttcatggtccggtggcacgccgtaccgtcctccaatggctacttcgcgggcacgtgcgctggccaacgactattatgcgtcccagtatagaggtgcaccggaccggtccggttcctgttagctatggaaaccatccaatcacatctcaaactcagggcacatggactcggtccagtggtgcaccggaccggtctagtgtccccgcagaagactggatttctacatctttttaaacgaaaggggcaactgctatgggcctttcggggctataaaaggaacccatggcacacctcttcagcacataagcatacttagggcttctctacacttctatactctgccacaacacatttgtgtgattctagcgagattgcgctcttgagatcttctctttcgtgttgtgttgctggttttggctcttgtgtgtacttcctctcctttattgtgctaaagttgcaactctgatcttgtgtacagctgcaagcaggggcggacccataggggggtccgggtgggccctagcacaccctaagccaggcccaccggggaccccacccggccatcccgttcgcccgttcagccgacgcctgacgttccaacttctctggttctcccgagcgttcggctaatcggcttcctcttcccagttcctggcgagtgcgctgtgcacggctgttcctcagttcctagcggctggtgtatggccaccggcgtcctgcaaggctgcaacagcatcttggcatcttgctcgtctggacgcctgctcggtcggctctagagccttcgcccctccggtcctgcaaaggctgcaagtctgcaacacatcttgcttggtcttcaagcaaccacatcttgtaacggcatcctgcaaggcttgcatggaacgcctactgcctgcgctcagtaacgctcgcgcggaggtgcccttccccgcgtacaggtgcgcatgaacatcgcgcctctcggctgattcactatcattatttttatagtgactaaaatatgaagaagcagggagatattgactcttttttttccaatcatgctgcaaagaaacataagtttattgtgtcgacacctaaaaacaagaggaagagaggataaatgaagaaattgtgaatccaatgccatctgcaccgccaccgccaacactttatgatgtcagccgtcttccacatgatctaagtgaaagacaacctattgcaagctaccatgctaatgatcatgatgcaattggaagagcatatattattattattagaggtccatttcaaccatatgcacatgaattcccaaataggaaaattggagatagagatcgccattttaattttgttgcggcacaccctatacaaaaatcctaggtccgccactggctgcaatagactccaatttgtggagattccttgcgagaggatattattgatataaggaagaccttgtcactcaagttcgatctttggatcaattgagagggttgaaagcaacccttgtctaagaggataccacaacgtggatgtaggcaagcatttcaggcttggccaaaccacgagataaaatcgtgtgtgttacttgttcatttactttcttgcgattttctttctttctaagttctccaaattcatttgtaatattgctcttagtctaatttacatcttgaaagagcaatcaagtgaaaatgacttttctctcttcttctctcttgaacttggtttagagttacactaacctcctaactttggactaagtttgagtttagagttacactaacctcctctctaggtgctctcagaaagtagaatccaaactggattatctatagataatattcacccaaaaaataggtgtgcatctcaatataggcaataagcacaacaactaatcctacctctcccaacccttttaagcactcatccacccaacctaggcggccagccaccagccgccccgcccaccaggcaacgtgtcactttgtttttattgttttgtatggttaaacaatgttgtccttattacatgtcagatttattggtaatgtattgtcgttgggtgtcgtgtagctagtaatgtcatataaaatataatgtgataataatttttttatcgaggataaggacccattggaaacccgatacccgaatggtgataggtatgagatgaatcttatacctatgatgagtacgagtatcgggatgaggatggttatagctttacaaggatgattatagataggatgtccaaaccgagtggtggattttccattctatggtggtaccaaccacagctgcagtgaacatttgttctggagacggtggaatacttgtcggccatactcagaaggtgcaacacaacatgagcaactaactttagtggttgacgaagagtttgacttttccatttctggagtgcatactgggtccatgggtaaacccgaagaacaaggaaagcacttgtccatcaattgcacttgagtagcaaaggtttcaggttgtcggtgctgacatctcttctactctgttaagaccaggctaagggggtgtttgaatgcactagaactaatagttagttggctaaaaattggtagtggaattagctagctaacaaataactatctaactattaactaatttaccaaaaatagctaatagttgaactattaactaaagtgtttggatgtctcaactaattttagctactaactattagctctagtgcattcaaacaccccttaagtgaatgtcatggtatgggctgacatttcgagaggtggagagtgtcatggtatgggctgccatgtgggccgagagtccgagaccgggctaaatgagctgggctgaataggactgactgcaggtagaaaggcaagcgcaacatttggcaccgttagctctccactaaacttgtcagatgcaataatttatgtttttattaatggcaaagccctcctgccagccagtgccttccttccgggtcaaccactggtacagtcacatcacgaattcccactggcagtacgataacctcactgagcggtagggcctcccgtcccagaatcctgcaggacccaccgatcatagccccacgggtcctgctcctgcgtgggttccagttccaagtcgcccaccgtgacgcccatcgagtcaaccgaacccaagccgtgtggcgactggcgaggcgagtgccccagttcctaactccggtgggcgcgctcccaccgccgcgcggctcaaaacccgccctcagcctcccgcgctccagtccacacgggagcgggtggtgtcgtctgaagcggcgcgatcaaggagccttcgagcgctccggtgagctatctagatctcaacatcctctcccctctgtagtctgtagttgtactctcccgcccgatggttcagttaagttatatcctctccccttatttttactcggtcgataccatttcgttgtggattgaaatgctgcggccctgtactatgaggatggttcctagttttgcgtctggcaatttggggcgtacatgcttttggctgcgtactgttactgatcggagaaaatgtttgtaacgtatgattcgtttttcaggacgtaacgtgctggcggttgcttatcgccggatatatatatataagcggaaatgttctccttgttctatggcctgtggaagtatgtgttcgccaaggacgagttccgtgttctgattcttggtgttgacagagctggcaagacggtagctgctagctcccagccttcatatatatatatttccctttctgaactagaaattgatgaaacttacctgtacacaatgtttctggaaccgttgccatagactttgctggagaagttgaaatcgatatatctcaagggggaaggacttccgcctgaccgtgtcgttccaacagttgggctcaacattggccgcatcgaagacgcaaaggcaaaacttgttttctgggatctaggtggtcaggtaagaacgtttacgtacgtagtaaagtgagccttctgttgccgtggcaccaccctacgatcgttgatatttgagtcttgtcagtttggtgctatatcagggtttctaatgcctgggaaatacatgtcataaaatcaaattactaggatgtggttgctttagttattaacctagcatctttttgcgttccagcagaatatatataatctagttatatggaatgctcaatagaattttcagaaagcaaagatatgctctgttggctaacattcacagtactcaatagaattgggtggctagtagaacagcatcagcttctctgctatgttataagaattagtgtaaaactaacttcagtatcactgcttgctagtatgataattaagcttccatgccaagttcagtatttcttacacacttgcctgcttggcaggttagcctacgaacaatctgggagaaatactatgaagaggcccatgccataatgtacgttattgacgctgccacagcatcgtcatttgaagattccaaatctgctttgggtaaggttcttatttgtgtcaattataaactacgccatccattccaaattataagacattttggcctttttctagataaataaattttgctatggacttaaatattaaaaatatatataatgtcctggtacatagttaaaacaatatatctagaaaagctaaaacatcgtcttataacttggaacagagggagtactggtttgtttctattgctagatctttccagaagatgcaatgcctctctggtaaatgggatgagaactcattctagagaacctaacctaaatttcttacttcagagaaggttattcgccatgaacatctgagaggagcaccactcttgatagttgcaaacaaacaggtgaagggtttacttccactttctatattttgtaccacagtacataattatgattgaaagatttagtgcttacaataaagttgccatcgtagttaaaataaagattttgtttttgtcatgtgcacatgctgtgaggcatacaaatataaattcctacgttgcaaagcgcctatgcgccattgcgaggttgaataccagatgtagtttttaaatcaattaaaacttcctgaaaagatcacatggaaaccaatgactacatgcactgtctgtttctgttaagctgggtacacattattctatcaaattgtttattatttacctctagcttgttctcatgtttggagggtgcttctggatttcttttggcaggatttacctggagccattgatgaggaagaattggctaaatttctgcataaagaactggatgagaggacatatacatttcaggctgtatctgcatatgatgggtgagcgcagaaactcaactggttcctgaggaaatttgactcgccatgaaaaaaatgacaattttactcaaagatacaaaaaaattcacacattcgtctgttatattgtttcctgggtgcatgatattctaaagatctgttatattgtttaaatgtgacaccggctcttgcaggagggggatcaaatctggcatagactggctggtggaacaaatggaaaaaagcaaacgtaccgagacactgcaggctcgtgctggcgtagctggacaaatttagaatggggtgaatttgttaaagaacaaagcattggataggaccgcttccttcgtatcgcgtaagcagccatttgctgcattccgggattatcgttccaggtcgcccagagtgctgcaagaaatgtttggctggttgctcctgtggtggtggtgattggtgaggcgattcgtttggtattattgaggttgcattcttatgtacctaaaggtcgcaagcatacatgtttatatgatgcttttcaattttcgtagcaaactagtagcttcaatacagaggatcaaagagagccgtgttctttaacttgtttgtgataaaaaaaaggaagaaaggaaagcgaagaaggaattattggtgcatctgaaagtctttattgatatgtctaaaccatttcaaccgatgttggatgaggttttcttcgcaccggtgttacatctagtctatcatatgtatcgtcgtttcatactcgatccttttttatggccaaactccaacacaacatatgcatttctgtagcgcatatgtattgaacatgtcttttttagactaacattttgcaccgaacaacatagcagatcgaattgtcatcctataaaacttctttttaacttttgtggtatcctattgtcatatagaatatcaaatgtttggcgctacctcatccattgactaatacctttatcaatatctctacgtagcatagatcctaaatatctaaagatgtccttcatggacactacttgatttttcaaactaacatgtctttcctaatatgtagtagcatagatcctaaatatctaaagatgtccttcctggacactacttgatttttcaaactaacatgtctttcctcatatgtagtagtgttgaaatcacatcttttatattcaatttgagttctactgatcgagtccaaaatcgtccaaaacctttaaactctagaatctcccaccacaactctagttttctatttactcgtgcttagctttcatcaactaacactacatccataaaaaacatatgttaagagatatccctttgtgatcttatccatagactcagctaattttttatgtagtcatattctaatcgaaaagtcacatgtgtctccatcatttattcaaacatattcataacattgttgttggaactttgcttcctcaaaaaacagggataaaaaacagtaaaaggaattggcccttcaggctagagctgctgatatccccactaagctgggccaatcggccaagaaactttgcttcattcagggcatgatatggacaacccactgcggattgccaaacaaagaagttagtaagaaaccacaaaatgcttagtctgagctttgaagagttctacttggtgagtaaaacagttaatcttaactactgcttggctaagataagatgttagctaaaagaattctgtagatgtgcaatctcaaaccaatctgcctttgcatcatttagaaaactgctttaaaattcgaaatattttgcttacaatagctcatagcacagaagaatattatagaacaaaccaaggcaagtgactttctgaaacacagttttcaagaacaggttcagattaaactagataacaggatgccagcgttggtaataagtctactccccaagagaagtcactgttttgttctttctcaatgaaaaataacgacacaaaaatgaactatggccgtctgcattaatatggatacgcagcaaaaatggacatgagtaactcaaaatcgtcaagtgcttgctatgttaagcacccaagtcaatgatttatattccatgatatcgcaaagattatctataacaagttctgagtgtgtttcaaacattaaatgatccatgaaaggtaagcacttgtatttagcggacagtactagtctgctgtgggattaacccattttttatggttctcgatggccttttgcttcaagataatatctgatccaattaatagacaaaatcacaagtaatctttgttacatgtcatcatcgaatcctatcttctgtaggagcaaacttaaacggtgacatatcaagcaacactatgagaattcatgtgtatctgataaaggatcattcacttcacatgtagacatatatgactacaaaagtggtatgaatattgttaacagaatcaatggaaaatggaatatatctcattaggtaacatatggaattgtaagcaggctataaaaaatcagaggtattaagtatcaattcagacagcagaatgatgcaatgatcacaaccaagtcaacaagttatcataactaagattagtccttttgtagccaaagaagtttaccgaactcagaaagcagaacataattcacttacttgatctcaacaacattttgtgtcaccatgccaggaagaaaccagaagtggcatggtaagcattgccagtccaaccagacctctgtgaagcattatcccatcactggaaacctccacaaagcgtgtttgctaaggcaaatggcatgtatctccatctaatgaacatacaaattttgccctgcctgatgttaagtaactacaggtaccaggtagactacaagtctacaactacaacattacataacagggatggaacaattacactcaaatgaacacttgaacagcaagagccagtctctgagacatctgcttcggcctggctaatcatagccccagtaaaccataacaacagttaaatcatccgtccaagattgtccaccctcaagaagtgcatgttgtgcaaattccccaatatatcctcagatgcatcaacatcgatatgaaagttgctgatatcttcaactccgccagcaccgctaacattaaccctaccagtgccatctgtagcatgtgctgcctcatttatgttaattctcctcacctcctcggcccttccatctccagcgttctcatccccagcccagccttcctgcccgagcatcgaagaatcaatgccactctccacaccaagagaacgtctcctgagccctaccccgaccttcttgcgggccgtcgtcttcttgatcctacctctagaagagccaccacgagcactgtcattctgtggctgcctaccaccatggtttccgtgactcctaccaccaccaccttggccactgggagccgtgttccaaggaaacatcttgtagaatggcttccagttggcacccaggtcggccgcgttgggaaatccgagggggaagaacccccaggcgcagtggtacatttcagtgcccggcacaacggtgggtggggtcgggagctcagaagccacgaatccgcggcggcagcccgcgttggggcacttgagggcgcgcccgatcaggctgcgcgggtactggtgcacgtagcagcagaaggggcacgccgtccagaactccggggtgtccgaggcgggagcggccgcggcgggatactgggaggagtaaggggtaccagtggcgggatcggcgggcggcggggggcggcgagagggatccgagaggaaggcgtaggcgtcgttgacgaggcggagcgccatctcggctcccgggtgcgggttgctggggccgaggaggagcgcgaggcggcggaaggcgcgggacacggcggcctggtcggggctgactccgggcggcagctggaggatggcgagcgggtccggctggcccgaggggcccatgaactgggaagcgaggaggacgtcggcgacggcgaggagctcgtcaacgccagcgaggagcgggttcgcctccatcgaccgctccgcgaagcgcttgcagccgacgaggtcgcgcgccgcgaggagcttctcggcgatctccagccagcgctccgcctgcgcggggccgtcgctggcgcctccgccgcccccgctcacgctcccgccggtggagaagtccatggtttgggggaggaaaaggtggatgctgtcggaggcagctggtttggttttggggagggggaagatcctgctgcccgaggggctcttgactggcgactgtctgtcagtccgagagtattttgttgggcagcacatttattttaaggacaactgtgattatacgttttcaacttcgtgaattattgattacgaaaattaaaaatgaggggtaaaatcataattgtaagggaagagaaggatatactcaaaattaatctgaaaataatattaaactttttatggttaattgtgattatagccttctctcactttacaattgtgattttaccccttatttttatttttaatcactaattctgatttttattaacgttgataaggcggtgcaaacaacggctttgttttcaaaacagaggggtaacaaagttaaaaaagaagggataaaatcacaattaaaatattagaaaagggtataatcacaattatcccttgattttattaggctctctccaatcattctccatctcaaatcccacatttggactttctattcatatttaaatatcctcatcttcactattatttccctattttacctcctctccaagcatccctctattcagctctccctttaccctttaactaagctatttgacttttctacatcagtttttagagtttttaatatttataatatcataatacacattgtcacttaaccaaacttatagcagattaattttatagttaaaaacactaattagtgaagagtagggttctatctttctcgttttacaaggtgttttccttctctcaccctacaagagggaggagagggacctgttgaagctctctcgatgtacgaaatcaccgaatacgtcgtgaaggggaggggaaaggatccgttggagagcgtcttatagcctgttagcttcgaattaaagtcagttgtttagattattgtagctgcaattcacagagaccaaaacactacagaaatagtaaaagccgtttcgaattaaaaccaagggaacgggctattagttttcccatatgcaaacataccagaccattgtagcgccccaccgcagagcaagttttgcatacaatcaatgtataattggactaccaaaaaccataaaaaattctaaaaatatataaatataatttattgtttactttattagattataaaattttaagtttaaatttatacaatagtaaaagaaaaaatatattcaattagataaaaaaaattccctcaattccgtaaaataaggcctgcattttaaaaaaaaaagactcaatgttttaaaacttttgactagtaattcagccaaaagcatatattttagtatatacatgttatatacttgatttgtattcaaaaattactttaatttaatgctcgttatgtttttattgatagcatattttgaaataaacaaatagtcaaagtttcgctccaaagactgtaccaaaaatatataccttgttatataagatgaatgaattatatattaacatagcataaatcaatctaggatcttaaatatgatatattgataaagtaaataatatatatgtataattttttaaatatttttgtgacttttgatagttggattgtatagaatgtttggttgcacaatagtattttcctcaagtgaaagatcttcatcaatgttgtaatacagtgacatgtcatcatcaagcctggttagatctatcctcaaaatctactccataaatttaagggccaattccctgtatgccactagaaaatatactcattccttgtatgccactgaccccacatgtcatagacaccaaaaaatatacctatatgccactcagtggcacacaaggaatgagtataaaatttgatggcataccaggaattttctctaaatttaatttagagtttctagagtacttctcttttaacttcaccttttttagctacacttgtttggttgaaatatagagccgcacagtcccaaacaaactctaaggatgagttgatgtatccccaagtatatcttacaaaaaatgatataatgactctatttatcttatagggtatttgtgattataccctctctggtcttgaaattgtgattttacccatcgtttttcaactttgtgatattttatcccttcattttgaaaacgaagagttgccatacccttgtgccgttagatgcagttaacaatgttaaatttgatgcaaaagataaaaatacccaagcaatttattttgattttaccctcgttatattatgtaatagtgatttcacccctattagggttgtgcccataaagaatagaaaaaggtagtttgaacctttcacccatttattttctcatttttttatttttaatcactaattctgattttcactaacgatgttgagagtgaagggcaaatggtagcttcgtatttaaaacggaggtgtaaaattagaaagttgaaaatgcagagtaaaatcacaattgcaaggccaacgaagggtataatcacaattatctcttatcttactagtagtaattattagattgtgaggaataaagtaatggcagattatttcattctattttataaaccaaacaaaacttggaaaagtaaaaatatgatggagtgtatgtgggggtggttagggaggaaaggcccaaaacaaagggttttcgaatcttacctaaataaaaatcatggcaagctaaattgctaaaacaagaatctaacgtgtttgtttggcacttgcataaagatggtatcttttctattaattatatgtataaattcttagttactaatggaattaatgttttatgaataatttggtgtctaaagatacctttaaagataaaaatcttcatgtagttctttcaaaaaaagagggtcattctcacaatctcacaaaaggtaattttatcaaaaagaaattgaaatagtgacacaacttgctcttttgagccacaaaccatctgatacatattttctttgagtgcacttatgctaggttactatagagagaagtttatatttttttttctcgaacacgcaggaaaactgcgcatcattatattgaaagagagaaaggtccgaaatggaccaaagtacaaagccaagcaggcaaaaaataaaaaggaaaaatagtacagcctcatgcactaggaatagccctgatcctagcaaaagcagccagaagtccgagactctcgagctgctttgcaccagccatataccagcattccacctcatccatgaaaagcctctgaatggtgctcaatgaagggttgacaccatcaaaaaccgccttattgcgatgtagccataaacaccaggcccctaggataatgagactatgaaaacctttttctgatatgtttggggactctcctatgcaccttttcccaccaatccacaaaagagcccgcctctctagtaggcgtaagatggcccatcctcaaagctgaaaatataacatgccaaaattgtctagcgaaactgcaagagcacaagaggtgcaagatagtttcctgctcttgatcacataatggacaaaccaccgggtgcggtagtcctttcctctgaagtctatccgcagtccaacatttattccttattgccagccaaacaaaaaatttgcatttggggggtgcccacgacttccacacccatttccatggctggaatgaaataactcccataaacaacgccgaataacaagattttgaggagaaaactccagagctcgaatgcacccacacatgtctgtcctcctcctgattaagcaccattccacttaaagcatcccacagctgcaaatactgttgtagaccaatcaaagataaaggattcgcgatatcacaaacccattgccaattatgcaacgcctgagcaacagttctcgaattaaatgacctgctactcaccatacttacaacttcaggggcaaaatcttgtatcctctgcccattcaaccatctgtccgaccagaaaaaagtatcggtccccttcccaacaacagagaccaccgaagaattaaaaaaatgtctaacttgctgctgcacggggatactcaaaccaagccacggcgagttggatcagtcttttctaaccagagccacttagcctgcagtgcccaactcttcaattgcaaattaggaacaccaagaccccctaaacttatggccttgtcacagtttcccagggaacaatacaacttccaccgttcacctcctttcgccctttccaaagaaactctctttgaatcttgtcaattgatttaataacccatttaggaattttaatggcaataaggagataaattgggatggtcgataagacaaaccgcactaatattgtcctctcggctaggttcaataaacgagccttccagttagggagtctgtgtgcaattttatctatccacaacttaagatcatttctcttcagcttcatgtctgagattggcagacccaagtaagaacaaggaaatgaggccacactgcacctcagcagtcctcttgaaccacatgctcctcatatctgataggaatagcataactcttattcatattggtaaccaatccggaggccgacccaaaacaatttagaatcaatctaacacatttcagatcttcctcaatgggtttaacaaaaaggaccacatcatcagcatagatagaaagcctgttacggactcctgccctttccaaactgtgcagcaatcccctatattcagcagtcctgaaaagactgctaagcacgtccatgatcagcacaaacaacatagatgaagacctctccgccactgaatatccaaaactgtttcaatgattaataccctacaaagatcccttttttttggacatgacgtctgtgatctgttgatctatctagctaacaagaaacgaagctgtcaaaatttgacaactttgctgaccaaaatctcttgtatgtcattttcagtcgaatgcattggcttggatcttgggcccaaatacaatgtctgaggagcaggagccgatgttgcaggcattccgcaagctagagaatgcggcaatgtatttttcacgttatttggcacgttatttggaccaagatgaagccagatacctttctattattaaaaaaacaagttccggcctctttacaatattttgtaatacgtagatcatatatgtttttatcggatctttttctgtaaaaaaattggagactgttgggggccttcggcttccgaaggtcctcaaaaacgtaatttgactatgttctccaaaagaaatatgtgaacaggtaccttcgaagtcaagttgcgagcatacaaaagcatggttaggacgaagcttaactgggacggcaatcacgatgaaggataagacgatcacgaagctatgcgcagaagagcttcggcataacggtggaaagggaaaccgacttaaagatgaaaagctagattaaacctcgaagaattattatagagttattgataaatgtaaaggacattaatgtaatcttgcatgggctgcgacccgtgtctataaataggtgaacagtattcccgtactgttcacgcagacttggcattcacttttgcgccacgtctgtattcttttccttcaagccgaaggtacacttgtaatttaacattgttcacacaagtaatatgaatgaaaatacattaataataatgtttatagaaattatgttattttctgtactttatttgaatgttctccatattttatcataatcaagagagtatgtccttcatgaccttcgtcctaaattcgttatatccaaaagagagataatgatttgaaggacgaagtgctttgatatttaacattttatgttgtcttgctcttgattcatagcatttgagagcaagtccccaacagagacaattgcatttttaggactctaaacattgtgcttcacacaaatgccatttaaaagattttcttcgcaagaaaaggactacaaacattttataattaattatactaccatttagtgtatattcttcctttttataatataatcttatgtattttttcaggtatccaacctataccgcacttcaagaacgccgaatggtcctccgggaccttgcgctacctgcttcaacgcctcctttgtttttggcatacaccacatagagtcagtcaactagcttgctggcgactgggttatgctgctgatcatgcttagcgcgatgcagggctggtctgcaggcacctgcaatgcaatcagagagatgatcccacgagaaaacaaataaggttttggttcatccaaacctaagaacctcccactctcacagacatgggaagcagatctcagatgagacggcacagttagggttcagacttgggacttacatagtgccctgctccaagaatccagtagaaatgcaggttcttgtgggacctgacaaaggccttggtgcccttgctggcgccacagtagaggggctgccttggcaggctcaggaaggtcctcagaccatcccatctgaaaacgagcaatccagatgcatcgttgaaatcctgccagagaatgggagggaataggttgccaaaaaaaaaacttacttgagcttctgaacccatgcttctgctccgttggtcgagcagattacgtcgagcttcagatagaggaaaagtcatgtatatatcaagttcagtaatgaaaaaaatgcagtcttattagtaaatgctaataatctcaatctcaacttcgaatattattagtcaatgccaatcattcactaagccactatccaatgaccttatcctggtctgtcttctagttttcatgatctgtgttttttttaattacaaagagtggacggctttatagcagataggatggcagtgtaatactaatcgaactaacagatatgcaggtctcctgtatattcgagaaaaaaaagagtagagatctatcctcctttttgtgaggggctgtaaacatactgttttgcagccgggctgcagcaaatttttttccgagtagttttgagctgctggggatcgtaagaattgaagttgcagactgttactgacctggccattgtacaccgtcacattaatgccataagacagcagctcatcaatctgaatgagaaaatgaagagggattaatttcagaaactgatcgagggcgcttttcatttatctgctcgaccagtttacctcatcgatcctcggtttcatgaaatcgttgaccagcgcgttgtagaccgagtcggattgctgcccccacctgtagacgtttaatttggaagcgcagccagcgtcacaggcagcattacattagcagcaggaaaccggctgtgacttgtgatgcgatatgagcactgctatggactgacatacgtgaagttcttggggattatcttgagcttttgcttgatgaccccattcatgatgccgtcaatggtgttggagccaggctgggagtcctggccgtacgtcgagtacttcttcatcgcctgcaagctgctcatcagtgatgaagaacccacgggcagcagtgccaccgggtccatgccggagtcgagcatgaaattgtaaacgtcctgccaaaaaaaagagattgcactgtagattatattgttcgaagagtgaagtttaaatataagaatgaagataagtaaactagccttacgacgttgccgctctttgtgtcgatgaaatctagcaggctgctccatgacttctgcgaggcggcccactgccccgccacgatttgctccttcaccgtctccgccttcctgaactcaaattcgcatgcccatatatgtgatgggggtgcgctaagcgtcaagagaaatttatgcatgcaaatggtggtggtgcagtgtgcgtgttgttgctgccttagagggtgtttggtttctagggactaatgtttagtccctagattttattccatttttggtccaaaattaccaaatatagaaactaaaactttattttaatttctatgtttatcaatttatacactaaaaaggaataaaatgaagggactaaacattagtccctagaaaccaaacacccccttacttgtttgcttcgtcgccggcgttgtcgtccagcctcgacacgctcagaagcagcggtgtgtaggaaagctgcagcagcattcaggcctcactttaattatcacatgcatattcatcatttgtgatttatccaagagaacactagtacagaacaagtcttcatcttttagtcccgatcagatggaagcattagtctcgattgaagctaccaaacaagactaaaatcactggtctaatttagtctcggttagtagcattagtctagatcaagccaaacctctagaactaattgttactggaactattattagttgaggatgttctaaatctaaagctaataccctagattattctgataagctatccacgtccctttttctaataagctaataggtagaaatggttcgaagcaatttaatcgtcaatcacttattagctggttttagctaggttgggatagctagttttagcttctagctattaattttataagtttggatatcctctagattatataattaaacttaaataagttaaagggtaaacaaacaatatagattattatttggcttttagataatatattagtacatgctacacgctagtttactaaaatagctaatagttaaattattagctagactatttaaatgtttttagctaattttatcagctaactattagctctgcaacgtagccgcagtttatttctgcactaacgaaactaagaacggtcaacctcaccgtgaaatcctccggcgagatccagctatctccaaccgccacacctgcagcaggagggaacgagaatttcatcgagtcagctgctctgctctgctctgctcccccaacgtcgatttggttcatcgagtcggagcccggagatggaacggaagcaaccttacgaacctccgagcgtgacgttgagctcgccagcgcggacggccctggcgatggacgcgccgagcgtggcggcgtacttgccgccgtaggactcggcgaccaggaacagcgggctgctcgccagggtgggcacctccttcgccagcgccctgaccaccgtcgtcatgtccgcggcctgctgccagtcgctggtcacgaacaggctgtcgtcctccacgtagctgtaccctgtgccgaccgggttgtcctgcgcgcgcgcccggccatggaagaagtcggtcagtgaggacatcacgacagcgaaaggtgtagaagaagagcggggggcagaagagaggatcggagaagagagccgccatcagctatcgctctctggtctgaccacaaagatgaggtcggccttgtggagccacgtcgagttgcgcggcttcaggtccacgtccagcggccccatctccaggaagttgccgagcccgaccccggacgcgccctgcgagagggacaagacaaccatggttgattactcgctcttgctcatcaggtagctagaccgtgctcccgtaatgaagcacagaggccggatcatgtcctcctgtgccgaagccgagaaattgtggtggtgtgaggagggaaagagagaacgaggcagcagctgcctaccgggccgccctgcagccagaggaccgtgggccatggcttggacggcgtcgacgtcctctgcgggctcttgtagtaccaccagaacaggtgcgcctctgcgacaaggcggcaaagcgtcgtcaacggcgacacctcgccttcgacgaagagaggctctgaagcgcaacgagctagggagggggtgttacgtacttggccggacctcgacgtacccccacagctccgactcgtcgggggtgccggcagtgatggacgcggcggaacaggcgcggagcgagacgaggcagaggaggaggtgcagggcaagcggggagtagcaacgcggcctgtccatgtcctcgaactcgaagacgcgagtgatgatgatgatgcacgaccgggggcgtggtgggtgtcgctgtgaggcgcgctgtgggcctgtggccaagagggcgagcgccgagacccgttttaaaataggtgaagcgttgtttcgctgacttttttttttgtattttgacacttttttggaaagattattacaaatatgtccttttaagtttcaattaaaaaaatagacctttacccggcgccattattattagtaccgagtttgcacgtctcgcgcggcaatatagatggcgtcgactgtcgagatctcactctctcacgctgatgtggcgtctatgtgacatgagatcggcgccatggtaattggcgccgaccctgttttctatgcccatcaaagtccgcctgctttatctaccgtctgtcatatggtatatcacatcatgggtacaatcatatatacttttccttcgatgccactggggagagagaacgaggagagagagtaggcactcgactactagaaattgtttttggcatgatgccgtgttgtttaattggggcagggagtatagagcctagagggagatatacagaggtgtccaagcagaacatgacgtgtactacaatgtatataatcaaatccttttctcattgaactaaatataacaaatactaaaaatttatagtagagttattttgagatgtgaaagattgataacgatgtttttcatatcgcgggtaaaaatttgagaaggaaataccatgtgcacatgttcatggagacgtgagagatgatgtgatagaaatggatatggatggaacggttggccggagagggaccattcttcttattgcgattattgtcttcttaagttctcatattcacttgtaatattgctactaagggggtgtttggttacaccccgctaaaatttagtccctgtcccatcgaatgtttgaacctccgttccgggtattaaatgtagtcggattatagaactaatttgtcagccgaagattaaaagacgagacgaatctagtccagttggttgggtctatatttcatactcctatttaaaagtcaaacgcttgatgtgacccgggctaaactttagcaggagcaaccaaacaccccctaagtttaatactcatcttaaagaagcaatcaagtgaagagttctcttttctcctctcttctcatcctaacttggttttagttctcgctaacatattttacaaaccaagtttgtgttgtttaaatctaattttgcaagatcacctattcatcccctctaggtgctctcacacaccgccttcttccatattgtctcctccgccaactgcaacatagccaacctagtctcccatggccgacaaagccaaaagctaatccctaactgttgggttgttgcagatagtatcagtgagacactattgtagattcaaactgaggtttcgatcgaggttccacccctctgctgccgcaaccgcatgggactcgccattgtctgcctctggccagatccacacttgtctaggtcagatccaccctccccaccccagatcgtggtccccaacccgagctcgcttctctgttgggtcattcaagctcgttctctaagaaggaggcccaaactcgccactccaccaccccgtccacgatcagatcgaggaaggagagtaaggcgccagtgtggaaggagagcacttgcctagcctcaagccccacgtttgagctcgtctactacccgttctcgaatgcatgttcccatctcgctttatgtagggccactctcttccctggattggctctcgccactagtggtgatgactgatcttagcgccagtagagaccccgtcttcagcagtcgccatctggtctacccagcatcatcacgtcgtcatcgtgggtcctcccttttcagaccatgttgctaataccagcggatgttgttgcaaggagtaagtcagagagaatctttgactttaagagatgggctcggggcagatgttatcgctgccttgcacacgaccaccaagtcagatcatgtaagaaatccttctgttgcatccgatgttgtcaccctagtcattacgagcgacattgtcgctttcggccttcctctcctgcccattgagttaactcctcaatacaatgtgaccatcctcaacaaacaatgacatgggatgaggtagtggccaagccttcaccaagtacgttgtcagctgacgccgttgcgaagtcttaacctaaaaatacatatttgtagatccaattgcagtgaagtgataaaaaagatggcatcatacacacaggtggtaagttggattttacaacgacagtcttctttgctttctatgaatgactctttacttttaggcttgtgttgattaaagatgtttgagaactttgtatccttttatatggccatccttataataagggcatgtttgcattcatgaggcaaacaatttgctggctaattttagcacattggtctccaaacaggttgactaataaattggctaattgttagccggagggctcacaaactgtttgtcaattagccatttgaccttgctaatgggtgctaatagatcgtataaagagaaaaataatatctattagccgagaatccaaacatactgaaagtcacctagagggggggtgaatagggcgaatctgaaatttacaaacttaattacaactacaagccgggttagcgttagaaataaaatcgagtccgagagagggtgcaaaacaaatcgcaagcgaataaagagtgtgacacgcggatttgttttaccgaggttcagtctcgtaaacctactccccgttgaggtggtcacaaagaccgggtctctttcaaccctttccctctctcaaacggtcgctcggaccgagtgagcttcttcttctcaatcaaacgggaacaaaacttccccgcaaggaccaccacacaattggtgtctcttgcctcggttataattgagttgttcgcaagaaagaacgaaagaaagaagcaatccaagcgcaaaagctcgaaagaacacaagcaaatctctctcactaatcactaaagctttgtgtggagttgggagaggatttgatcacttgggtgtgtctagaattgaatgctagagctcttgtatgtagttggaagatggaaaacttggatgacttgaatgtgggggtggttggggtatttatagccccaaccaccaaactagccgtttggtggaggctgctgtcgcatggcgcaccggacaaagtccggtgcgccagccacgtcacctagccgttgggttccgaccgttggagctttgacttgtgggcccgccaggctgttcggtggcgcaccagataagtcctgtagactgtccggtgtgccacccacgcgtgctatgtcctctgcgcgcgcaggcgcgtatttaatgtgttgcagtcgaccgttgcgcgtaaagtagtcgttgctccgctggctcaccggacagtccggtgtgcaccggacatgtccggtgaattatagcggagcggattcccgaagctagcgagttcagagttgctctcccttggagcaccggacactgtccggtggtgcaccggacagtccggtgaattatagcggagcgcctctagaatttcccgaaggttaggagttcagcgtgaagtcccctggtgcaccggacactgtccggtggcacaccagacagtccggtgcgctagaccagggcacacttcggttatcccttgctctctttgttgaaccctttacttggtctttttattggccttttatgaacctttggcacctgtataacttatagactagagcaaactagttagtccaattatttgtgttgggcaattcaaccaccaaaatcaattaggaaataggtgtaagcctaattccctttcaatctccccctttttggtgattgatgccaacacaaaccaaagcaagtatgaaatacataatttgaactagttgcaagattgtaagtgcaaaggttacttagaattgagccaatagaaatacttataggatacgcatggattgtttcttcatttttaacattttggaccatgcttgcaccacatgttttgtttttgcaaattcgttttgtaaatccttttcaaagtcttttgcaaatagtcaaaggtaaatgaataagattttgcgaagcattttcaagatttgaaattttctccccctgtttcaaatgcttttcctttgactaaacaaaactcccctcaataaattctcctcttagtgttcaagagggttttaagatatcaattttgaaaaatactatactactttctcccccttttgaacacaataagataccaattttaaaaactcttttgaaaatagggtggtggtgcggtccttttgctttgggctaatactttctccccctttggcatgaatcgccaaaaacggatatgagtgaaatgtaagcccttttctcaaactactttctcccctttggcaaataaaacatatgagtgaagattataccaaagatggagagttgctcagagcgacgtcgaaggatgagtcatggagtggaagcctttgtcttcgccgaagactccaattccctttctatacacctatgacttgtttttggaattcacttgaaaaacacattagtcatagcatatagaagagacatgatcaaaggtatacttatgagctatgtgtgcaaaatatcaaaagaagttcctagaatcaagaatatttagctcatgcctaagtttgttaaaagtttgttcatcaagtggcttggtaaagatatcggctaattgttctttagtgttaatataagcaatctcgatatctcccttttgttggtgatcccttagaaagtgataccgaatgactatgtgtttagtgcggctatgctcgatgggattatccgccatgcggattgcactctcattatcacatagaagaggaactttggttaatttgtaaccatagtccctaagggtttgcctcatccaaagtagttgcgcgcaacaatggcctacgacaatgaactcggcttcagcggtagaaagagctacggaattttgcttctttgaagcctaagacaccaagcatcttcccaagaactggcaagtccccaatgtgctttttctattaattttacaccccgcccaatcggcatccgaataaccaattaaatcaaaagtggatcccctaggataccaaagcccaaacttaggagtataaactaaatatctcaagattcgttttacggccgtaaggtgagcttccttagggtcggcttggaatcttgcacacatgcatacagaaagcattatatccggtcgagatgcgcataaatatagcaaagagcctatcatcgaccggtataccttttgatcgacggatttacctcccgcgtcgaggtcgagatgcccattggttcccatgggtgtcttgatgggtttggcatccttcatcccaaacttggttagaatgtcttgaatatactttgtttggctaatgaaggtgccctcttggagttgcttcacttgaaatcccaagaagtacttcaactcccccatcatagacatctcgaatttttgtgtcatgatcctactaaactcttcacaagtagattcgttagtagacccaaatataatatcatcaacataaatttggcatacaaacaaatcattttcaagtgttttggtaaagagtgtaggatcggcctttccgactttgaagccattagcgataataaaatctctaaggcattcataccatgctcttggggcttgcttgagcccataaagcgccttagagagcttataaacatggttagggtactcactatcttcaaagccgggaggttgctcaacatagacctcttccttgattggtccattgaggaaggcacttttcacgtccatttgataaagcttaaagtcatggtaagtagcataggctaataatattcgaattgactcaagcctagctacgggtgcataggtttcaccgaaatccaaaccttcgacttgtgaatatcccttggccacaagtcgggctttgttccttgtcaccacaccatgctcatcttgcttgttgcggaacacccacttggttcctacaacattttgattaggacgtggaactaaatgccatacctcattcctagtgaagttattgagctcctcttgcatcgccaccacccaatccgaatcttgaagtgcttcctctaccctgtgtggctcaatagaggaaacaaaagagtaatgctcacaaaaatgtgcaacacgagatctagtggttacccccttatgaatatcgccgaggatggtgtcgatggggtgatctcgttggattgcttggtggactcttgggtgtggcggccttggatcttcatcctcattgtcttgatcatttgcatctcccccttgatcattgccgtcatcttgaggtggctcatctctttgatcttctccttcatcaatttgagcctcatcctcattttgagttggtggagatgcttgcatggaggaggatggttgatcttgtgcatttggaggctcttcggattccttaggacacacatccccaatggacatgttccttagcgcgatgcacggagcctcttcattacctatctcatcaagatcaacttgctctacttgagagccattagtctcatcaaacacaacgtcacaagaaacttcaacttgtccagtggacttgttaaagactctatatgcccttgtgtttgaatcatatcctagtaaaaaaccttctacagtcttaggagcaaatttagattttctacctcttttaacaagtataaagcatttgctaccaaagactctaaaatatgaaatgttaggctttttaccggttaggagttcatacgatgtcttcttgaggattcggtgtagatataaccggttgatggcgtagcaggcggtgttgaccgcctcggcccaaaaccgatccgaggtcttgtactcatcaagcatggttcttgccatgtccaatagagttctattcttcctctccactacaccattttgttgtggcgtgtagggagaagagaactcatgcttgatgccctccttctcagagttcttgaactccgtcccgttgtcgcttctaattttcttgatccttaagccgaactcgttttgagcccgtctcaagaatccttttaaggtctcttgggtatgagatttttcctgcaaaaagaacatccaagtgaagcgagaataatcatccacaataactagacagtacttactcccgccgatgcttatgtaagcaatcgggtcgaataggtccatgtgtaggagctctagtggcctgtcagttgtcatgatgttcttatgcggatgatgagtcccaacttgcttttctgcttggcatgcgctacaaatcctgtctttctcaaaatgaacatttgttaatcctaaaatgtgctctccctttagaagcttatgaagattcttcatcccaacatgggctagtcggtggtgccagagccaacccatgttagacttagcaattaagcaagtgtcgagttcagctctatcaaagtctaccaagtatagctgaccctctaaacactcccttaaatgctactgaatcatcacttcttctaaagacaatgacacctacatcagtaaatagacagttgtagcccattttgcataattgagaaacgaaaagcaaattgtaatctaaagaatctacaagaaaaacattggaaatagaatggtcagaagatatagcaattttacccaatcctttgaccaaaccttgatttccatccccaaatgtgatagctcgttggggatcttggtttttcttgtaggaggagaacatcttcttctcccctgtcatgtggtttgtgcacccgctatcgatgatccaacttgagcccccggatgcataaacctacaaaacaaatttagttcttgactttaggtacccaaatggttttgggtcctttgacattagatacaagaactttgggtacccaaacacaagtctttgaccccttgtgcttgcccccaacatatttggcaactactttgccggatttgttagttaaaacatatgatgcatcaaaagttttaaatgacatgtcagaatcatttgatgcactaggagttttcttcttaggcaacttagcacgggttggttgcctagagctagatgtctcacccttatacataaaagcatgattagggccagagtgagacttcctagagtgaattctcctaattttgtcctcgggataaccggtagggtacaaaatgtaaccctcgttatcctgaggcatgggagccttgcccttaacaaagttagacaatttcttaggaggggcattaattttgacattgcctccctgttggaaaccaatgccacccttaatgccagggcgtctcccactacagagcatgcttctagcaaatttaaaattttcattttctaagtcatgctcactaatcttagcattaagttgagctatgtgatcattttgtttcttaattaaagctaggtggtcaatggatagcatcaacattaatgtctctacagctagtacaaatggaagtgtttcaacggtagatgtagagggtttgcaagattttaattctacaaccttagcatgcaatatatcatttttacttctaaggtcggaaatggaagcattgcaaacatctaattctttagccttagcaagcaatttttcattttcattcctaaggctagcaagagaaatgttcaattcttctatcttagcaagcaactcaacattatcatttggaattgaaacattacaaacatttgaatcaaccttagttaacaaattagcattctcatttctaaggttgtcaatagtctcatggcaagtgcttagctcactagaaagtttttcacatttttctacttctagagcgtaagcatttttgaccttaacatgcttcttattttctttaataaggaagtcctcttgggtgtccaagagatcatccttctcatgaatagcactaattaattcatttaatttttccttttgttgcatgtttaggttggcaaaaagaatgcgtaagttatcctcctcatggctagcattatcctcatcactagaggtttcatatttagtggaggatcttgattttaccttctttcttttgtcgtcctttgccatgaggcacttgtggccgacgttggggaagagaagtcccttggtgacggcgatgtttgcggcgtcctcgttggaggaggagtcggtggagctctcgtcggagtcccactcccggcaaacatgggcatcgctgtccttcttcttgtagtatctcttcttctcctttcttctccccttcttgtcgtcgcccctgtcactgtcactagatagtggacattttgcaataaaatgaccgggcttaccacatttgtagcatactttcttggagcggggcttgtaatctttccccctcctttgcttgaggatttggcggaagctcttgatgacgagcgccatttcctcgttgtcgagcttggaggcgtcgatgggtgttctactcggtgtagactcctccttcttctcctctgtcgccttgaatgcgacaggttgtacttcggacgtggagggaccatcaagctcgttgatcttctttgagcctttgatcatcaattcaaagctcacaaaatgacctataacctcctcgggggacattagtgtatatctaggatttcctcgaattaattgaacttgtgtagggttaagaaaaacgagggatcttagaataaccttaaccatctcatggtcatcccatttcttactcccgaggttgcgcacttggttcaccaaggttttgagccggttgtacatgtcttgtggctcctccccttggcgaagtcggaagcgaccgagctccccctcgatcgtttcccgcttggtgattttggtcacctcgtctccttcgtgcgcgatctttagcgtgtcccaaatctccttagcatttttcaacccttgcaccttattatactcctctcgacttagagaggcgaggagtatagttgaggcttgggagttgaagtgttggatttgggccacttcgtcctcatcataatcttcatcccctacggatgttacctgtgcaccaaactcaacaacatcccatatacttttgtggagtgaggttagatgaaatcgcatcaaatcactccacctagcataatcttcaccatcaaatgttggtggtttgcctaatgggacggaaagtaaaggtgtatgttttggaatgcgaggatagcgtaaggggatcttactaaacttcttgcgctcatggcgcttagaagtaatggatggcgcgtcggagccggaggtggaaggtgctgaagtatcggtctcgtagtagaccacctttctcatcttctttttcttgtcgccactctgatgcgacttgtgggaagaggatttcttctccttcccctttcccttgtttcgggactcttccgatgaagccttcccgtggcttgtagtgggcttgtcgccggtctccatctccttcttggcgtgatctcccgacatcacttcgagcggttaggctctaatgaagcaccggcctctgataccaattgaaagtcgcctagagggggggggggtgaatagggtgaatctgaaatttacaaacttaattacaactacaagtcgggttagcgttagaaatataatcgagtccgagagagagggtgcaaaacaaatcgcaagcgaataaagagtgtgacacgcggatttgttttaccgaggttcggttctcccaaacctactccccgttgaggtggtcacaaagaccgggtctctttcaaccctttccctctctcaaacggtccctcggaccgagtgagcttcttcttctcaatcaaacgggaacaaaacttccccgcaaggaccaccacaaaattggtgtttcttgcctcggttacaattgagttgttcacaagaaagaacgaaagaaagaagcaatccaagcgcaagagctcgaaagaacacaagcaaatctctctcactaatcactaaagctttgtgtggagttgggagaggatttgatcacttgggtgtgtctagaattgaatgctagagctcttgtatgtagttggaagatggaaaacttggatgacttgaatgtgggggtggttggggtatttatagccccaaccaccggacactgtctggtgcgctagccacgtcacctggccgttgggtttcgaccgttggagctctgacttgtgggcccgccaggctgtccggtggcgcaccggacaagtcctgtagactgtccagtgtgccacccgcgggtgctctatcctctgcgcgcgcaggcgcgcatttaatacgttgcagtcgaccgttgcgcgcgaagtagccgttgctccgctggctcaccggacagtccggtgtgcaccggacatgtccggtgaattatagcggagcggattcccgaagctagcgagttcagagttgctctttcttggaacaccggacactgtccggtggtgcaccggacagtccggtgaattatagcggagcgcctctggaatttctcgaaggtgatgagttcagcgtgaagtcccctggtgcaccggacactgtccgttggtgcaccggacagtccggtgcgccagaccagggcacacttcggttatcccttgctctctttgttgaaccctttacttggtctttttattgaccttttgtgaacctttggcacctgtataacttataaactagagcaaactagttagtccaattatttgtgttggacaattcaaccaccaaaatcaattaggaaataggtgtaagcctaattccctttcacataccctggctaattattctatctaattatttgctggctaattgttagccaccgacaaacaattagccaagatgatccaaacagatcctaagcttagtctgatttctttagtagggctatctccggcatcactcttatctcattctttatctcaccttatattttaaactttatactatacaaatattgttatttacatcgtaaaacagtatttacctaccagataacttattttcagcttctttacaaatttaagcagaagttctgccaaatagatagcttctgctacaacttattagttcagctgcttcttaaaatgaactaaaaacagccaacaaacagaagctgctttttaccagcttatcagataagctactttttttaaccagcagcagctggccaaaagctcagagaagtaagccgcatgttatttcccgtatgcacgtgtgatgcgatgtttatttgctgttgtgtgatccacatccggaatggatggaagggacgttgtgatgtttgatgaagtgtggagacaataaggccaaaagttaatacaaatcaaatcaatgttatcggtgtagacgatagtggggggttacacgataacaaaatatgcatttagggtatgtttggatcttgtgacagctaattttagcatattaacctctaaataggccaactaacaaattaactaattgttagctagagggcgggcaaactggtttgatattagcggtttgatcttactaataagtgctaataaatcatataaagagaaaaaatatatctattagctaagtctccaaacataaactagctaatttttactaccgactaatcattagccacggacaaacaataagccacaagaacatggccttagaatctttcccggaaaagaaaaaaaatactgttcgatccaaaactccagcggcgagtttgttccatctcgtgtttcgttccgccggctgcagcgtgccgtgcatcctgcttattaagcgtcgtacgtaatgcagtgaacgtgacatcgtccgggtatggttgcgttatgcccgtctgaatcgtggcgccagctgctcttatctggattttttgctggggaaggttgcagtgtacgctacttctttcctctagatctgccttgttttccggcgtacgtggtgtagaaagcaactctacccgagcaactccaaagagtctatctataatataattttttttggttaaagaaatacgctccaacaatttttaattacatctttaaatataggtatttctattttaatttatcgccagctagaaataaaagtaaggatggatttcaagagcgtgtataagatataataaactattgaagagtagaaaaaatatagaacgtggtttatatttaattgatctctaaatgataatttagaaagtggttttaaaaaaaggctctcaaagagtgtttttgctgtacagcgcaaccgtacatgtgcaaagcttatttataccattctagacctctagatcggttttctatgtacaagatacgatcaagagattacatgatacaactctaaccctataaattataaatatagttaaaagacaaatatgggtgtcactggttgcttgcacggaccatcgttcaagcccaactcagccacctacccttctctttggttgtttgtacctcccattgaaccggactaatctgatgcaaatagccaggccagaccgagcagaatgaaccattttggtcgcaggctagacaccaaaaccgagacctggttttattcatccaattaagaaactaatttcacttttgtgttcttgttatttttatttttatgaataaaactaaatctcacttgctatatgtcgtggttttttgaaccgggagacaataagatttatgttcggcaggggtgctagcgtggactccctccgaatggtgagctacggggggctcgaaggtgaatctgagacaagggattatactggttcaggccagagtcctagtccagtgtagtgcttgacagtagtattgcttggggcgtgttacaattgggtgcttgtgtgaagctgagggatgtcttggatgatggtggttgtcttgcccttttatagctcaagggtatacgttataatgagaacttgtattctattagggtgaagtttggcctcctgcttctgggcctcgtagcccctatgttgttgtctgctgggtcatgcttctatgcctcgtagcctctatggtgtggtctgctgggtcgtgtgtcgccgtatccctgatatggcattatgtctcgtccattcgccaatgggttcctatacctattccaatacagacgtagcggtgcttggtgggtcctgctgagtcacctcgaggtgaggtttagggatgtcttaagtaaagctttatcttccgtcatccctttagcataacctttcatcatgcgtaggcgtatgcctggtacggtgtattgcctcgtcccttctggcgtatggatcactgtagagaccccgatgttgaggtatctaaagctggggttgtccggtcccactggttagcagggatacgtatctagcgtcgtgcttgatagagacccttcggtaccgcttccatggtctggacatggcttggtgatgatctgtcccatcgtgttgtcatggcttgataaaattatgtcgactcttccctctagtagaggtgttcgcctgagcgtcgtttgtcgtcttgtcgggtcgctcggcagccaggttgatcggcagccccgtctcgccggggcgctcggttggtgaaagggaaatgtggccttgagccatttctataagtgttttggtgattagatgcccaacacgtattgtttgagttcttatgtgctaaatgtgtgagaagtgcaaatcaaagaacaaggtatgtttctagacttagtaaattggttttgaatactaacatgtttatgtaagtactagaaacagtgccaagaaaagaagaaaggagatggagaagagttggctatgtacagccaaaactagctcgagcctggcacaccggactgtccggtggtgcaccggacaatgtccggtgccccaggctgctcgacggtgaactggctgctctcaagaattggccgggcgacatggctaaaattcaccggactgtccggaggtgcaccggactgtctggtgagagttcagcgctagcgcccaagcacatcggcgacgaactcgtcgctctcgggaaacgaagaaagcgtcgcggaaaaaaatcactggaccgtccggtgtagagatggcaacggggctatccccgtcggggatcgtcggaacgtttgcatccccatttaaaatatatcccccgttccccgcccccgtccccgctcgcggggatagtttttccccgtccccgtccccgaacggggatatctcccccgacgggtatcccgtccctgacaaatccccgagatgaatatcattccaacatcatgactaatatattttagatgcaaaatgagcaaagatatagtacttgttctcctcatacaatcataccagtaacgattcaacaatcaacataggcatcaagtttaaggtgtcaagcaagcatgtaacatcatcatcacacatcagtcactaccgattacacaaaaggttactggttacataaatagctaatgctgaattgggtgagcacattgcaaatgcatgccttcttgacagttgatttcatgaacttgcacttctccccaggtagttcgactgtacttaaagtgaaagttcctgcaagaatatatatggaaacacagaatagttataatgtggtaaaatactagacacatgaattgattgttcttattttatatgaaccacctgtagcccttcctgcacctcttggagaacagaccagaaggtagcaggttgcccttcatcattcaccatccctacacacacaaacacacatatatgcaagtgtcattttcagctaggcttatgaagtaggaatgatgaattacaagagaaaaggctccaaattgaagagaaagaatatgagctacataagagatatacctttgtatttgtttctgatccaatcttgtgagcacattaaagcctccaacatttgagaagtcaacctactacgatgctcacttaggactcgaccgctggtgctaaatgcagattctgaagcaactgtggttattggaatggcaaatatatcccttgctatcctcctcaaagtagggtaccttgttcctgcaaccttccaccaatctaaaatatcaaatccagttgtatgtatgtccaccatctcatcatccaagtagcgatcgagttcagatttattcctaaaggatgctggtttagtgcttgcaagacgggcactaaaggaagacaagaaccctgaattgcctactgaaggtgctgctgactttgcactactaccacatctaccttcatcttcttccaaattgtattgaagcatcaaatcagccaatgagtttttaaccttttcaacctcatactcacaatttattccaggtgtaccaagtaacacctcaaagcactgaagcaacattatttgtttgaaacgcggatcaagcatagtagcaatccccatcaacccttgaatattagtccaatatttcttaaactttgcttccatgttaactgacattgcctctatcaatggattgccacaagatgaccactttgtaatgttacttctaatatcacaaatcttgtagaagaacatattagcagtcacataattagttcaagagaacagatcagatatgtcattgaacattttaagccttcctataacctcagtagcaaattcccattcttcctcagtgggacagcaggaatattgcttatctacacgagttgctctcatgaaaacagccctatatggatatgcagtactaagcattttgtaggtggagttccatcttgtcttgcagtccaagcttaacttcttatcaatggtaacattaacatacttagctatctcctcaaacttctctactctttttggagtggctgtccaataagctacgctatcacgaatattttcaatggcgtctttcagtgactcataaagtacatcaccaataacatcatgagtgtgagggcttggcacatatataaacctacaaatcacacaagaattttgtataacatgttcacacaagaatttcagacccacaaatcacaattattacctcatgataatgtttcttagtgtccaagattcatcaacaaagtgtgcagtgatagccatgtaacctctcttttggttattagaggtccacatatcactagtgatagcaacccgggatttaattccggtcatgtattgaatggctttcttcttctctaaatcatattgctcaacaatgtgcttcctgaaataaaaagggaatagctttaggaataaataacacatgcacacaacataacaaaaacatgttacaaccatgatattatgtaccttagtgtgtttctagtcccaatcttgaacaacggttgaagggcatgcacaaacctttgaaatccagcatgatcgaccatgcttaagggatactcatggagaattatcatggcagcaagttcctttctagctatgtcctgatcaaatgtgtagttttccactgaaactgtccctgcatctgtggcactaaacctcaaagaagtttgtgacaatgtcttgttcccagccaactttatcttcctaagtgtgcaagacttcaagtgatcatgcaaatgcttagtcccagcccgtgtttcgcctccaagcttggtgaagcaatagttgcattttgcctttatttttccattccatctcactctcttgaactccttccaaacgactgatgtgagcttcctctttgaacctacctcaacaccatcttcttctacacactcctcatcttctatttcaattgcttctgattcattaatagattcatgacgtgattcagcttcaggctatgaactaattggagcttggctactgccaccactctcaattgacatctgaaacctataaatcagtatagatttgctcaatataaatcagcaaatagaaacatttatataaatcaacagatagaaatttcagatacattgtaggcagtaatatctatagttctataccaaataaatatgcagaaaaaacatttgtcatatttatatatgaccctagttgcagattgcgtacttacttgcgtccaggtgtctcagttgcagatttcttcaagcagcgcctcttcgaatccgaagtgttctttgatggtggtcggggaagtagcttcggatcaccaggagtaaatggtttggtctgtttggtgaacgatgacggaggagctttcttgttctcaggcggacgcggtggccgatcagtggcacggtcgtcccttgaggtgggacggacgggggcatcagtagaaggcagaggctgcaaggttaataagaagataggaggaggaagaaggtcttcaccggggggcgtctctgtcttcaacgccggcaactagggatccaggcattgtcgccatggtggtcggtgaagctgttttgcggcggcggccaggagcctgggctctctcgaccagcaggaagcaaactagggttatttgtttattttatatggcacattctcgtacggacagcaggaagcaagtgtggtgtgtgcggtgtgccttttgggctgctaacgaacaacaggaagcaaacttgggtttgggctgcttgcgagttgtaacaagcaattgattagattgggctgcagccattagactggtgaatcccatcggggagcagggacggggacaagtggaacgttccatccctggttcacccgttggggatgatttttagtccacgagaatccccgcggggagctatatcatcccgttatcatcccctaatagatgaaatccccaccggggatcggggatcggggccccgttgccatccctagtccggtggtgcaccggactgtccggtgagttagagccgcccgagccaacggtcaccagcgcaatcagcgggcgacgtgtggcccgcgccaacggtcgattgggcacactggactgtccggtgtgcaccggatagtgtccggtgcgccaaccggtcccaaggcccaacggtcggtagcgcccgatatggaaagagatcgtgcaccggactgctacagttgttgtccggtggtgcaccggattgtccggtgcaccactcgacagaaggcaggaattgccttccaagttggtctccaacggctcctagctgccttggggctataaaagggaccccctaggcgcatggagcaaaatacggagccttctctaagcattctaagacttccagactccgcctccacgcattttctgcctccacgcatttgattgattgtgttagtgatttgagctctgtttgagttgcaaactctctgtgctgtgtttcgagctcaagttttggcttgtgtgcgtgggtgtgctgtgaatttgggtcttgcgtgtgttgctctcctatccttactcttgtgctttctttgtgatctatattgtaagggcgagaggctccaacttgtggagattcctcgcaaacgggaagaatcctcaaaagagaaaagaccgtggtattcaagttgatcattggatcacttgaaaggggttgagtgcaaccctcgtccaattgggacgccacaacgtggaagtaggcaagtgttacttggccgaaccacgggataaaaatcgtgtgtctcttgtgttgctcttctgtgattgttttgttcgcaagagatcgcttcatagcaacttgattaactcgcactaacttttatataatcaagtctgtggctatttagcgtttgattttacaggatcacctattcacccccctctaggtgctctcagtaggcaggttgatcgacaaccccgcctcactgggttgctcaacaatatttgttcggcgagcagattggtcaacaatcccacctcgtcgggtcgctcggcggcgggttggtcgacagtctcgccccgtcgagttgcttggcaggtgggccgatcggttagtgggtcgtccttaggatgccttttgggccttctttgggtacctggttcttaggtacccaacactatatgtaatactttttatttttttggatcatttctcactcagccaaccaatcaaaatctattctagacctggcagaattagttttgattttcaaaggatggacgataagtttaaggacatactacttctaagtgtcttttggagttacgagacactcagaatagtttaggattttatattccctttggtcatactataaaccgggtataaactagtagtttgattcaggtgagtttaatggtttaggtctggtgcgaacttatcaaacttagcactaggtagctatgagaaggcacaagaatcaattggaatctcccccattcacaaatattttgaattgaaagtgaaaatagggtgaagtgattaggtccatgaggacagggattgtcggaccattgagctaggttcggtgtgcccacatgtcactactagagcacaggagaggttttgagagcacctagagggggggtgaataggtgatcctgttaaaatcaacactagatagtccaaacttgttttatcaaatgttagtaaggttaaaaccaagatgctatagagagaactcttcacttgattgttcctttagaatgagtaataaacttaggaacaatagcacaagtgattaagtgagaactctagaagagaaatcaatcacaataaaaagtgacacaagagacatggtgattttatcccgtggttcgaccaatgcatactccacgttgtggtgacctccttcagtcaaggattgcactcaatccctctcaagtgatccaataatcaaccttgagtaccacggttttcttccttagtagatggttcccgtttgtgagaaatctccacaagttggagccactcacccttacaagatcgatctcaatgaaaaccacaagagtaagggagggaaagaaacacacgcacatgctagaatcgcagcaacaatacgcacacaagttaagaagagagcacacaagaacaatgcaacaagttcacaacacatctagtgctcaaatctcagtcacgatgatccgaatgcgtatttgtggagtctaggcgtcttaggatgttcaatggaggcttggtgtattgctccatgcgcctaggggtcccttttattgccctagggcagctaggagccgttggatctccatttggtaggcaattcttgccttctgtcggttggcgcaccggacagtctggtgcaccaccggacatgaaaagtgcccgatttctttcctcttctagcgaagccgaccgttgagcctttggtccccttggcgcaccggacactttccggtgcacaccggacagtccggtgcggcctggtgatcgttggctcggcccacgtgtcgcccgttgatcgcgcagccgaccgttggcgcgggcattgatggctcaccggatagtccggtgcaccaccggacagtccagtgaattttagccgcggcgccctcggttttttccgagagcgacgagttcgtcgtcgggccagcctgggcaccgaacactgtccggtgcacaccggacggtccggtgtacctcaggctggtgcaagtttggttggacttagccaaacttcttcattccaatttcatttgatttgacgagcatcctagcacttagagaaatgtgttagtaccaaaaacaattcaataaggccagattcataccttgattctttgatttgcatttttcaaccacttagtacatattaaacaaaatatgtgttgggcatctaatcaccaaaacaattatagaaatggtccaagggcacatttccctttcaggtttgaggttgttggaccctgaccattgggtccatcttaccaaacgctatagtcagtgcaattagggtttgctctaaggagcatcgaacgctagtatagagtggtgcatcataccgatggttataatgtttgaagacttccaaagagggttcaagcacaccaaaccggcccaacaggaccattggaccatgtgctttaggtaggttgtagctgctagttatagctgatgtctgatatagtgatcttattgtgatcattgagtctcatcaagctatagaggtggtatgagtcataggcctcagatggtctagtgaacccattttactgcaaagggattgtaatgcctagttgggtagtatttattatactgctactcttccatgaaacctcttgttggggacttgtccttaaatgctatgaattaagaacaaggcaacacagaaattgttaaacgttaaagtccttcgtccttcgaagcattacttctcttgggatataatgagtctcggacgaaggttatgaaagacataccttcataagtacaacaaataaacaagaaggattcatataaggtatgggaaataacataagcacttgaatattattattacctcatttctatcttatctttattgaaaaatagaaatgataacaaattacaaatgtaccttcggcttgaaagaaggcaaaagtacaagagtgacgcaaaagcaaatgccaagtcagcgtgaacagtacgggaacactgttcatctatttataggcacgggacgcagcccatgtaaaattacacctatgccctttacatttgctaataactctatagtattccatcaaggtctaaatggccttttcctctttaagtcggtttccttttcccttatcatgccgaagctcctctgcgcatagcttcggctatgtgccatccttcgtattctttatgcttcttcacactgtggttttgacataagtccgaaggtacctgtttatgtatcatactccagaaacattgttaaatcatgtttttgaggaccttcggaagctgaaggcccccaacagtagccccacgcaatattaatttgttagaatgataaattcaaattgcgatatggacgaaggccttaagccgaaggtccgaaaaaacaccttccctttgctagaatagcaatcagtcaatgacaagcggggccctcccacttgcaacacgctaggcctataaataagagcacaccacaagcacaattggcacgccttcttgccatctgctcttgctttcccaatttttagctcttgcgcaccaacacttgcttggttcttaaattttctaagcttcggccttgagagcagttttttagcatttccgaagatgtctgaagataaacaagctgttgctgcaacgaagctgagcctttctgaggagaagaatcttggctttcttgagtcaatagcaaagacgaatacggagaagattactagggagattttagaaggtttatctgaagaaactggtgataatgacagttatgatatagaaagcggcggagaagactccgaagatcgaccttggcgaccaagtcatgcagtttttggaaaatcaactattaaacagagccatcttgacaatatgagggggagatattttcaggatatgtctattgtgagagctaacatcggagataagacttgtcctactcccgaagaaaatgaagtcgtgatcttccgaagcttcttcaaggctgggcttcggttccctctaagcagtttcgtggttgaggttttgaagatattccagatttttcttcaccagattacccccgaagccattataagaatgggagtcttcgtctgggctgcgaggagccaaggcttggagccaaatgcaaaaagcttctgcagcatgcacgaactgttatatgagacgaaaccctgggcaaagagcaatatcataacaattttggctgctatagcttcgtcgctcgctctggctcgagctgccccgtgccaaccttccggaaaagatggcctagggactggacgaaggaatggttttacgtgaaaaatgatttaaaggcacaagaagatattaaagatattatcatgcgtcctatttggcagtgattcggccttcggaaaccgaaggtggaaattgatgaagcagccgaagagtgccaaaaggccttcgacatagtctgctctttcatcgggacgagggatttagtccaggagcacatagccttcagagtgtggccgcttgtagaacaatgggaaatgccgaaggagactatcagcaagtctgacgaaggtgagctggttaggttgaaatacacattcagatatgaaggtaagtttattgagccagatgatgattggctgaaatgcatcgaagcaacaagcgacgaactgcttggaccatattcaaaggcagaagataacacgttatctgcggccttcggagtccggaagaagaagaggctgaatagagttttcgatgctattgggtttatgtaccctgattaccgctacccgctgaaagggcaaaagagaaaaagtgcaacttctgggaaaggtgatgcttcagttgttctaagtgagcccgcgccaaagaagaaaaaggtgaaggtccttactcaccgatcgcgcttcattgaaccggccacagtgcccgaatttggtggcgagacccctatggctactaaagccaaaggacctgctcctacacagaagaatgaagagccagctgcatcgccgaaagcaccgctggccaaattgagtgagccgaaggtcgataatgttaaagaggcagaggtcgagagaaaaaagatatcagaagttacaagtccttcggcagaagtgacagtgccgaaggcacaaaaagatcttatagttaccctgttggggacttgttctcaaatgctatgaattaagaacaaggcaacataaaatgttaaatatcaatgcccttcgtccgccgaaacattatatccacaaggatttaatgaacttcggacgaaggtcgcgagcatagtattacgaaggtttcaccttcataattaaacttataaagataatataaagtgaagtaaaacatgaaacattaaaggtaaatttattgaaaataaatgatttcattcacatatcttattatatgaatttaagatctttgaatacaacatttaagtacatttatacctttgccttgacaaacaataattcccgagtgatgcgttagcaattacaggaatccgtgaacagtaagggaatactattcactatttataggcacgggacacagctcatgaggaattacaattatgcccctcataaaagtttacaacaatgactcagacccttacgggttaaaaagtcattctatctttaagtcggttcgacccttcagcttcggatatgctgtagttccgaagctttgtaaacggtgtcttcgtcatcatgttcaagcagcttcagccgaagctgtttctttccgaaggaccttcggcgacgaagcatggtcccaacagtagccccttcgcggtgctagatcgtttttcgtaacgagcttgatccgtgaaaaaagtctcttaggcttcagaaagccgaaggtccgaaaaacaccttccctgatctcgttgttgagaaacgatagagtttccgagcgcaaagcggtcccaccatgcaggttcactattttggtttttgcggcccaccgttcagcgggtgcgagcaactgtttgcctggtgtaaaaatcctgacgattcaccttcttacctgcagcactatataaacagacgggtaggtgtgaagttaccacagcattcattgctattgcactgttttgctgccaaaatttttaaccatagccgaagcttgactttcgcattcaaacgaagctccagtttggtgtttgcttcgtcagaagaagagcttcggaagaaaaaggttattaatttccaagaaatttttcaagaaattcaaaattaaatggccagagtgcgctctactgctagagttgaacgcgagggagacgaagccgaaggtgcggaaactgttcctatctctgaagcaatgaagcgatctggattgatgacatcagaagacatccctgctgctgaagtagaacaagcagatattgagggggctgattctgacggtgattacaatatcgcagtaccgagcaagcctagccatctggacttcggaaagtcgaccatctcgaaggctgatttcccaaagatggtgaagtcgggctactttagcgaagatgagaaaaagctgattcgctttggtggagaggaaattacccgaagcctcagaaagatgaaatagtgattttcaagagtttcctcaaagctggtttgagatttcctttgaataggatgattgctgatgtgctaaaaaagttcgggatctattttcatcaactaactcataacgctattgttaggcttagtgtttatatttgggctcttcgaagccagggggtggagccatttgccgaaggtttctaccgagtacacgagttacactaccaaaccaaggccagaaaggatggacttcatgaaaattttggttgttacaatttcgcctatcggaaaactacaaaatttcctgtgatcagctaccgaagcaagtggtcggcaggctggaaatcggaatggttctacatcaaagttgatgacgacaaggagaagcttgtacagagtccgcttgaactaatcttcggagaaacccgaccccagtgcaatatgacaccagaaggtccaacccaaacagcgttggctgaattcagaattattgcagagcacattggcaccagggatttggtgcaggaatttctggctttcaaagtatttccaactatgaaggaatggactatgccaaagcttaaaggagagaagaaagagggggagctggtctgactatcctatcattataaattcaagaaatattttaaggcaccctgccaagaatggctcgaaacaatcgaaataatgagcactgaaattcttggaaattactctaaaaaagaagaccaattaatgacagtagccttcggcacccggccgaaatgaaggctaaacagagtacttgatgctatcggcttcgaatatcctgattatggtcgattgggcagagatgctggaggcccgaaaagaaaaagaattgccagcgccgttgacgaagaaagcaccaaagtggccaaaaagaaaaaggaaacttctgaaaagctgagccctgagccgaaggtggctgctgcaagaaaaaggaaaactgcatctctagaaccgaaagcattggttcaagaagaagaaactcctgcgacaccttctgctaccgaagtagaagggattctgaaggtaatgactgaacccttgcctgtcaagctaagtccgctggcgccggaactgacgaagttttttcagaaggacaaagaagcttcggcagcagaaagtcctgcactgccgaagaaacgaagaattattcaaatagcagatgtgattcatcagacgccgccactggcgacagtgtcaaaaattgtttctgtcgagaccgctgaagccgaaggtgccacagccgaagccaccagagtggaaaccactgaagctgaaatcggcgaagccgaagctaccggggccgaagccgagaccacggaaggttcaaatctggaaaccactcttgaagttattgacaatatactcctgaaaatggctgaagaagaagctgttgtggctgcggtaaacacgacaactgaaaagggaaaggagcagatcgacaacattttagaagaagaaaattttaactttcaagatttgcttggacaagagctaacaggcgtggaaaaagaagagctgaaaaaatatgccatatcttgcgggtataagccaggggctacgctatttggtggggtcaacgaagggaagttaagatgccttcggaaccgcaccgaggccaaagttgttagaaccctctccaaaggcgttggcctgccgaaactagaagcggacctctgcaggtatcaacgacaccatattgctggaagcctgctctatgctaattttaaggtaacaaattttattatttttattatatttatttattttttaggtcgttttctgacaaagattgttttggcagagtatacttttgagtaaggttctaaaaatgcaacaagatctcgaagaggagaagaacaaaactatcatcaaagatttggaagaaaagttgaaaattacgaagctgttttgaaaaagaaggacttcaccatccaggaccttgaaatcatggctaaagaacacgaaggtgcattggaaaagaaagactttgttattcagtctatggaaggctccttggctgaggtccaagacgagaataacagtttaaagaatgaattgctcaaacaactagaaaaatctgagcaggagaagaaacaccttgaagcaagtcttaaaactgagatagaaaggaattcaaatttgcaaaaatccttgaagaagcttcaatagaaatgcctaagcttcggcagccaatgcgtgcagcggctgaaggatgtgtttcattctattggagccagctctgaaaaatttacaccttcagctgaaaacttgcccagcacattagaatatattgaaggcgaggttgatgctcttgacgaagttattggtggtcatgctgacttctgcgccctggtagcttctcggggcacagctaccgcttttctgaaggctggctgcacacatggaaaaattgtgaataggccaaacttcagcttatcatcatcagatctgatagatattctaagcctagcccgaagtatcggaaatagatttatgacccaaatttgggtaaacagcgggcggaaaatggcgggtgacgaagctcgaagtcatcttaagccggtaagaagcttatatttgttacttttaccttctccttgaaatttgtacctttcttattctgttctttaatatacataggatgacgaagctgaagtataacgaagctgaagtatgacaaagcggaagtatgacgaagctgaagtatgacgacctgaagcttgatagttgctacaatattctttcctgcaaaaattctcgagagacttttgtaatattattatggaaaaacttatgtaaatttgtacataccttgtaatatattttgtttccgctatctgtgtacaatctgctttgttgtggacgaaacttcttttttgagtcgaaggcgaaaaacaccttcccttcttttcgtacataacgaagcataaaaatttttcctttttcgaagtctttcctcattgccgaagcacctatcttttttgtgtggtatgatgattctatatatgtctaaatgaatgtttatgaatgcaaatgacatgatgaaatgtattgtggagatgaatattgggaatgattcaaatcctttcacttttcagcttcatcgtttacttttcggtgtattagcgttgacttttcactgtaagcctcccttaggagcttcttcgccttttactttcagcggaatcaacgttgactttttgctgtaagcctcccttaggagcttcttcgccttttactttcagcagaatcagcgttgacttttcgctgtaagctctgcattcccttaggaacgacttttgagcttctccctgttttcttttcttttcccttggcatttacatttacattttttgggggatatcacttttatagaattgaaataaggaaaagaagaaatacatgttgtggccccattaaaaacctttctccccctttggaaaggaaaagggtgccacaaaaaagaacagaaaaaattacatcaaattaaacataatatcgccgaagctcatccgcatttcatgacctagggatgtcgttgccgtccatatccttcaatctataggaaccgggtcttgacaaagatattaccaaaaaaggtccttcccacttcagctgtaatttgctcactgtctcagggttggctactcttcgaagcaccagatgtcctggttcaatgttcttcagcttaacctttctgtcccgccattttattgtttcggcttgatatttattgatgttttctgcagcttgaagtctgatcccttctatggcatctttttccacagagcaatcagcttcttcttcaccttctgccgaagctaccgttcttattgatcctgctttggcttcttccggggttattgcttcatccccaaacaatagtttgaaaggcgtaaagcctgttgatcttgacatggttgtgttatggctccacaccactttgattaactcatctggccactttcccctgggctgattgaagattgacttcattattcctgtcattatgatcccgttagctcgttcgacaagtccgtttgactccggatgtcgaactgatgcaaaatagatcttcatgccaatttgattacaaaattctctgaaagcttcagaatcaatctgtgttccattatccacagtaattgccttcggcactccgaagcgacaaacaatattttgccaggaaaacttttgaatagtaaccgaagttattgtggctagaggctttgcctcaatccacttagaaaaatattccactgccactacaacatatcttaagtttccctgtgctggtggtaatggacctagtaaatcaaggccccacctttgcaacggccaagtaggttgtattaattgagttaaagacgaaggttgtttttgatctcttgcacatttctgacaaccttcgcacttttggactaaatccgctgcatccgaagctgcctttggccaatagaatccttgacaaaaaactttcccgagcaaaggcctagatccaatgtgagatccacacaggcctgcgtgtatttccttcattaattctatacctttggatctggataaacacttgagcaatggggaacagaccccacgcttgtatagctccccttttattatgacatatggtcgagctcttgcttctattcttctgttataagcttcgtcgtctgaaagaaaattaccctgaaggaaagagataatttcagttctccaatcttcactatacacaggggatatattgaggatcactctttcaagaagctcgaccaaaggtgcttttattgtttcgaaaaatacttccgaaggtaaaggcagcccctgtgctgctgacttggccaatagatcagcatattcattttctccacgaggaatatttttaacagagaatccctcaaaggaagcctcaatccttcggactgtatctagatatttttcaagcttcggatctcttgctttatagctcttgtcaatatgactagaaataacttgggaatcaattttaaggatggcccttctgatccccattgcttttaacttccgaagacccaagagcagagcttcgtattcagcaatattgtttgtacaactgaaatcaagtcttgccacataacaagttttaactttggaaggtgaaaccaacacagcagctgcccctgctccgaaggttccccaagacccatcacaaaacactgcccatgcttcgacatctttattcgtttcttcctcctgagcccctggcgtccagtcagcaatgaagtctgccaacgcttgggactgaatcgaagatctatggacataatcaatacaaaattcattgagctctgtagcccattttccgatccttccagtagcttctcgatttctcataatatccttcaacgattgtgaagaaggaacaactatgttgtaagcttgaaaataatgccgaagcttcctggagaccatcaaaacagcatacagtactttctccaattctgtataatttttctttgataaactaagaacttcggatacaaaatatattggggcctgcttcttgacttggccttcaagcttctcctggacaagcgctgcacttaccgctgagtgtgaagctgccacatataataacaaaggagcccctggcgttggtggagttagtgttgttagatttatcaaatattgcttcagttcttcgaaggctctctgctggactggtccccattgaaaaacttcggctgacttcagcacttcgaaaaatggtaaatttctctctgctgatctagatacgaatctgttgagagatgccagccttcctgtcaatctttgagcccccttctttgtgcttggtggttccattcgaagtatagcttcgattttgcttggattagcctcaattccctttgttgaaactaggcaaccaagaaatttccccttcttcactccgaagacacatttttctggattcagctttaaaccagcctgtctaaaattagcgaaggtctcctgtagatcaacaatgtgattatcttgcttcgtgctttttacaatgatatcatcaacataagttagcacattcctgcctatctgggaatggagaactttcgctgtcattctgctgaagcttcctccagcattcttaagcccctcaggcatccgaaggtaacaatatgttccactaggggttatgaagctggttttcggttcatcctccttcatccagatttggtgatagcctgaatagcaatccagcagactcataagctctgatgaagctgctgcatcgactaaggaatctatccttggcaatggaaactcgtccttcggacaggccttattgagatcagtaaaatcgatacacattctccatttaccattggccttcttcaccataacggtgttagccaaccattctgggtattttacctctctgataactccggcactgaggagtctcttcacttcattccgagcaccttcggccttgtcatcggacatcttccgaagcctctgctttctaggtctgaaggatggatcgacattgagcgagtgctcaataacatccctgttaacttcgcaaagatcattagctgaccaagcaaaaacatctttattgttgaacaaaaaccatatcaaggtcttctcctgttcttcggacagttgagatcccaatagcaccttctgctctgctatgtcctcacataagagcatgggcttcggctgatcagccgaatcagctttttcccttctgaacttgtattgctcacaggcttcagctccatctatattatggattgcttttgagtctgtccaatttccttcggctcttctggcagcttcctgacttccatgaatagcaatgggcccttggtccgaaggtatcttcatgcaaagataagctggatgaagaattgcttcgaaggcattgagagtaccacgaccaatgattgcattgtaagggtattccatgtcaacaatatcaaatacaacttgttcagtccttgtgttgttgataaatccgaaggtcactggcattgtgattttgtcgagtgctacaatctgccttcctccgaagccgcaaaggggatgtgtggcatcatgaattttgtcttcgggctcttgcatatgtctgaaggccttagcaaatatgatatcagctgcactgcctgtatcaaccaaaacattatggaccagaaatcctttgatcacacacgagataaccatagcatcgttgtgttggtaatccttgagttgaagatcctcttgggagaaggtgattggtacgtgagaccatcttgacttgatgaagggtccttgcaccccgacatgttgtacccttctctgtgcctccttcttctgcttcttgttggctggctctgagcatgaaccgcctgttatcgggagtaccaacttcggggccgaagcagctccagcttgaatgttggacgaagccattagctcgaaaaagtggaagtgagttcaccggaggtgggcgccaacgttggggacttgttctcaaatgctatgaattaagaacaaggcaacataaaatgttaaatatcaatgcccttcgtccgccaaaactttatatccacaaggatttaatgaacttcggacgaaggtcgcgagcatagtattacgaaggtttcaccttcgtaattaaacttataaagataatataaagtgaagtaaaacatgaaacattaaaggtaaatttattgaaaataaatgacttcattcacatatcttattatatgaatttaagatctttgaatacaacgtttaagtacatttatacctttgccttgacaaacaatgattcccgagtgatgcgttagcaattacaggaatccgtgaacagtaagggaatactgttcactatttataggcacgggacacagctcatgaggaattacaattatgcccctcataaaagtttacaacaatgactcagacccttacgggttaaaaggtcattctatctttaagtcagttcgacccttcagcttcggatatgctttagttccgaagctttgtaaacggtgtcttcgtcatcatgttcaagcagcttcagccgaagctgtttctttccgcaggaccttcggcgacgaagcatggtcccaacataccccgaaaaggaaaaggatggtccacgtactagatgtactggaggaaataaagactacaagctctactccaagaaaaacaaccgaagtttcaaaaaacgcgaattgaaacaaaacaagctggagccgaagctgcaaaaagtcatgccgagtccgaagctggaccctcagagcccgccaggaagaagtccctggaagaggaagctccagaacagactctgtcagaaaaaactgccactcctactcccgaagcatcttccgaaattgtcgattatattgtacgacatgctttgggaaaaaggttgtctgaaaaagaaaagcgagaagctcaattttatgcccaaaaattgaaatatccaaagggggcattgatttttaatggcagcggagaagaagatttcttgtattgtctcccagacagtaaggaaatttctgtctgccgggagatgggcaaaagcttcggattcccgacgttggaagatggactttcggtgctatcgaaagatgaactggcggacagcttagcatataatagcctaaaggtaaaaaaaattgttatattaaaaaattgagatttattttatttgcttatacttaatttcatacttctttcgcagggcctcattcttagcaacgccctttgggcacaaaaaagtgccgaagatgaagggtgtagtatagccttgaacaaccttcgttccgaagtaattgaactaaggaacgaaggtcttaaaaaagataagattttaaactcattgttaaacagaataaaagaagacgaagctactgccaaagcccaagctgaagcccagagaagcgaaattgaggatctctggaaacaactggcagaggcaaaattaaaatgtgcaattgccgaagctgaccgggacgccagtaactattggaaaaattattgggagaagacagttgtagaactttggtcttcaaaagagaaatgctacgaaaaatccatagaatgtgtgcaaaaaataaaatccagcttcgctaatgttggcgcattctctagcgaggacaacttcgtaaggggcgatcctgaaggcctaattgattggatcagcaacgaagccgaagcctttgaagaaattttgagtggtctcggggatgtctgcgccttctcaggtgccaggggaatcatggctattttggagaaatcaggctgtgatcacgtgaaagctttggctcaaaccgaagctaccttatctattgaagatacaaaggacccctcggccgaagcaagcttagttggcgggaaattctttactgacatctgggagaatggcgaccgagagatggtgcacgagataataaaaaagagtgaaaaagattctcatgatgcaaaaaagcgatgaaagcagttgagaaagccgcggatcttgaaaggtggataggtattgcttaataacttttaactttatattttatttttgtgacttcagacttatttatgttttctatcgtagctgagctatctccttccctagagcccttcgggccaacggtcgacccagaagcaaagaaagaggaagaaatcactaaaatggccgaagctattttggatgaagccatctctcgactattaaacgaagctgcggaagcagttttaaaagaagaatagttgttattgtaaaaacatttggaatgtaatatttgctgaacaaagtgtgtaatatttttataatttgaatgtaatatataagctgctcgtaactcaattctttacgatgcatgaaactttacgtacataccgtttttgagccttcggcgaaaaaacaccttcccttcttttcatgcttcgtgaagaatatccatacttcgtaaaaacattatgcttcataagcaatagatctctttttcatattagagttgatgaagttgtacttgttcaaaacttattgtgccttggcactgcttcttcgaaacaatctcgaagatcaacattgtatccccttcttgtgttattgatgcaatatgatgttatgctatgcaaaatgatgtgatgatgttatgctatgcaaaatgatatttatgtcgaagatacataaacattcccacagtagagcacacaatctttttgccgtttatttttcggcttcaccgcttatttttcggtgtatcagcgctgacttttcgctgtaagcctcccttaggtgcttcttcgccttttacttcggcggtatttgcgttgactttttgcgcttcgccttatacttcggtggaatcagcgtttatttctcgctgtaagctctgcattccctttggaacgacttttgagcagaaaacttacgctgcgctcccttagaaatgactttttgtaacttcggcaaacttacgctgcgtttcatagaacgacttttttgtagtttcggagatactttctgtagccacaagttcttaagaacgagttttcatgcttcatcaactttttgaattccgtaagtctgtggagaagatatattttcactatgacaaaaacaaagctgttacaagaaattgaaaacaacaagaaaaacttaggctttcaatgattgttctttattaaaaagaaaaatgataactaatgcaagaactatttcagaagtaggatatctgttagtagatgtgctttgactctggcacaatactgttgactgtgcgagcttcggactcctctctgaagtctcgttgctgatgagtgtgctggctcccttctggctgctggcctcgttgtattggtggtggaggtggaagctgttgccaagatgcctgaggttggcttgccgaagcaacagaagctgcaggatggttacccttacccacatactctggaatgtacggtgagtggtacgaagcagtatgcataacttgcttcggctggctctgttgggctgcagtttctgctatctctttctgtttctggatggtgacatggcacatcctggtagtatggcccttgtcctcaccgcagaatagacaataaattttcctgggctgatccccaaaccttcctccgaagcccctggctcctctgccccttggggctggaggccgaggataactctgttgctgccccgaagcctaggaggaatattgcggcctctgttgctgacttcccctgtcgtcattctgagtggaatgaattgatctgacatgtctagggtgtactctccctccgaagcccctggtcatctcggagaatctgtaagaaggcccccaacacctctctttcccattcgtttaggtgagaaaacacattggggagcactagggagttctttcctagtgaggcgtctgtgatttgataatcacaagattaaggatttcattagtgcatgtgtagtagcaagtgtgcatccaccttcctcattaagcttgtttaggataagccagagtttgtgccggttactcttgatgttcaacaacaccaagatggcttggtggtaattaagagcttggtgatctctcagtggtgctcgtgagagtcccaactcattgtgtaataaaagattataggtgattcaccatgccggagtggtgaataatcaacccgtagagagcattgagtccttgaatggatcgatggggggctacacccttgtgtgggtcaagtcagagttttagcagttcttgcacccatgatctcatcgtgaagcatagataaatttaaattcttttgaattatttatatatgacaacactattcgtcgctctaggtgactatcacctaccctaaaatgacttaacaaatctttattaattgttaagtcattcacatttttgttaatccactccaaagtcagggtgtttagtgtttttacatccatgtctccttagactcacggtgtctctcccagattctctctcaccctcacctctctctcactagccactagggaacgcaacacccatcgatggctcttcgccccatgaaacgttcacacaatcgcaattgtcgaggcatgcatggctgggagagcagacatggaggcatacgtgctagggttgcacatgggcaagagggtgggtgtggctattcagatatgcatggtgagcaagatgggtgaggttgtgggcatgatgaggggataaggaagaataagatctcttttgttaggctgtctccagcagctatcgtatcccattccctatcgcatcccctattttaaactttactatgcaaacaatgtaatatatagtgcagattccctattttacacaatgtgttgtagacaaccttggagctcttgcataaaagctctagttttggctctagctcctctgagaaaacaatccccaccatgtttttaggaagaatccctgaagggcaccccatttggttggaaatacatctcctcctacaggattatgtttgacttttttttgcaatgtgggacccacaggggagaggaggacgagaaggaaccggagagcctattttttgggctcctggcttcgcttggtttctaggggcggctccttcctattttcacaaaggagctagtagaggagcctcccatttcatgattttttgaaggatctatttaaggagccttgaaagagccctaccaaggtaggcctagaaataataaaggaggaaaaagagaaggtatcacaacttttgtctacaacgtgaaaatgtttggctaaatagataaaacagtttgaattttatcgattcaattgtttattgagggcatgtttgggagggctttagttctagcttctttcgcgaaaaatccagagccctacaaaatgacgtttggtaaaacgacttcttccgaaaaacacccaaaaacccaagatattttatactacgaaggaaaggtcacacatcctagttagcttcactggttctagctccttccaattttgcaaaaaagtcacaaaggataagccattttttcaaatgatttgtgaaatgcctacgctaaaaagtctacttttccaaaaaaactagagctagagccgtttttggcaagtcagaaccctaccaaatagtccctcagtttaagcaaagtgaggctatactgaagctaaattatgccaaattgggcctacatctccatattttcaaccaaatgctttagggtttcttgtaatcgacatgatttgtttcttcataaatagtatatggaccgctccaaaatactccatccgtttcaatttatattacgtttgatctttttaccctaaatttgatcgactcgtcttattaaaaaagttcataactattaataatctttactgtgatatcatttagcatataatatactttaagtgtagctttgattttttttttgcaaaaattaaatgaaacgacccaatcaaacttgataaaaaagtaaaactaattataaatttggacataaggagtaggagggtgtttgaatacactagagttaatagttagttgtcttaaaatttgctagtacaattagctagctaacaaatatttaggtaactattagctaatttgctaaaaacagctaatagttgaactattagttgaactattagctagactgtttggatgtattcaactaattttagcagctaactattagttatagtataatattcaaacacctcctaattaaaatggacaaatatctattcccttggtcccttgcgttagattttccatatatcctcatttagtataaaaagaatcatcaaaaagtggacaacccctagtggaacaccattttagtagtggttgcatgaaacctttcgcgcatcagttactatgtgtcactctaaaaatggggcagcatgtacgcagtgcctatatttatacaaggcatctatcgttgcctcctcagttcatcactaatcacacttattgtgccctcgacgagtatctagctagctcattaatcgatcaatcggggtgtgcggtcgaaggcggcaatggcgagctactcgtcgcggcgtccatgcaatacctgtagcacgaaggcgatggccgggagcgtggtcggcgagcccgtcgtgctggggcagagggtgacggtgctgacggtggacggcggcggcgtccggggtctcatcccgggaaccatcctcgccttcctggaggccaggctgcaggagctggacggaccggaggcgaggctggcggactacttcgactacatcgccggaaccagcaccggcggtctcatcaccgccatgctcaccgcgcccggcaaggacaagcggcctctctacgctgccaaggacatcaactacttttacatggagaactgcccgcgcatcttccctcagaagtgagtccgatgctgccgccattgttctcgcatccatccagcatcgtacgtcctctatacatctgcggatgatcatttgcgcatgtttgtggcatgcatgtgagcaggagcaggcttgcggccgccatgtccgcgctgaggaagccaaagtacaacggcaagtgcatgcgcagcctgattaggagcatcctcggcgagacgagggtaagcgagacgctgaccaacgtcatcatccctgccttcgacatcaggctgctgcagcctatcatcttctctacctacgacgtacgtacgtcgtcacgaatgattcatctgtacgtcgtcgcatgcgaatggctgcctacgccgtgcgctaacatactcagctctttccgatctgctgcgccaatttgcaggccaagagcacgcctctgaagaacgcgctgctctcggacgtgtgcattggcacgtccgccgcgccgacctacctcccggcgcactacttccagactgaagacgccaacggcaaggagcgcgaatacaacctcatcgacggcggtgtggcggccaacaacccggtaactgactagctaactgcaaaacgaacgcacagactccatgtccatggcggcccacaaggtcgatgctaattgttgcttatgtatgtcgcccgattgcacatgcgtagacgatggttgcgatgacgcagatcaccaaaaagatgcttgccagcaaggacaaggccgaggagctgtacccagtgaacccgtcgaactgccgcaggttcctggtgctgtccatcgggacggggtcgacgtccgagcagggcctctacacggcgcggcagtgctcccggtggggcatctgccggtggctccgcaacaacggcatggcccccatcatcgacatcttcatggcggccagctcggacctggtggacatccacgtcgccgcgatgttccagtcgctccacagcgacggcgactacctacgcatccaggacaactcgctccgtggcgccgcggcaaccgtggacgcggcgacgccggagaacatgcggacgctcgtcgggatcggggagcggatgctggcacagcgggtgtccagggtcaacgtggagacagggagcgaggtacgaaccggtgaccggagaaggaagcaatgccgatgccctcggtgggctcgctaggcagctctccgaggagaggagaacaaggctcgcgcgccgcgtctctgccatcaaccccagaagctctagatgtgcgccctacgatatctaagacaagtggctttactgtcaatcacatgcttgtaaataagtagactttattttaataaaatataaatatatatatattctgataaccaagattcgaaccctcacttatacacaattttatcttattttttataaaatgagaatggaaaggactaccgtgaacgactatagaaccaatcatactagtttaaaatgctcgtaagctatgacgaacctagtaggccggtgctggaccattccaaaaaacctataaaaataaatttaatattaaattaaacatatggtctatatatcagatattaaactcaaaagaataattattataatttatcttagctaaaaggttgagaaaggtatgcgttaaaaaagagttttaacccatttttatagcttatttgatcgcccgtccacttttagggagcgaggtggtactatgcagaagtgttgcgctgtgtgcgacttactatcatgttgggtttaggtggattctcacgacccaatgatagacgagaagtgtgggagatgaacaaacctacgcatttcgcgtacgacacatgtgtttgaacaacgagttagattggaaaaaatataatgaccttttttgcaaaaatgactacaatgaaaaccaggaaaaccggtgcttcataggagtagagatttgacggtaaattgttacgatctactggtatttgctgcgaggatgtattcgcttggtgaaaacagaattacagagtagcagtagcagggaagacagtagcgagaggagaagaagaaacttgaggaagaagaagataaatgtagttgttacatcctgccttcgccgtaggtctcagcgagcatatatcttcaggtcctccattctgggccctggaatctcacattggccttacgctggcgtgttcctcttctcggcccaactgtagtcttctcttgaggcccaccagtctccacattcctttgttgctgctatagctcctcggacacggctgcttccgcctgctgctgcacctggatgtcttctgaagtcgacttgcgtggagggacagtgctgccattcccctcccgataacacgctgcttgtccccaagcaggcgctcgagggaacctctgacgaagtggaatcaggtcctcccaagttgccagagatggatgcaactcagaccacagaatcaaccgttgtgatgctccattaggcccccatcggcattgtagtactcgttcaggaatttggtggttgtcaaggcgatcaggaagctgtgccaccaccactaaagaacccactgccttcttgagttgtgaaacatggaacacgggatggatagtagaagtaactggaagctccagcctgtaagcaacagatcccaacttagcagcaactggaaatggcccaaaaagcgaaaatctagcttctgatttgcccgaggtgcaagcgatgactgcacataaggctgcataacagccttctcttgcagccactctccgaggataggcacaggagtggaatccaaaatgtcaatgccaaaatgcttgggtgcataaccatatagcacctcaaatggagacattttcaatgctgaatgccaactagaattgtaccaaaattctgccaagtacaaccagtcaatccatttgtgaggacaagcatgcacaaaacatctcaaaaaggtctcaaggcactgattaactctctttgtttgtccatcggattgagggtgataggaagaactcatattcagtgatacaccagccagggtaaacaatgatttccagagctgactagtaaagattttatcgcgatcagagaccatagcagatggcataccatgcaggcgataaatgtgttgcataaaggccttggccaccactgcagctgtgaaggggtgtttaaggggaatgaaatgtccaaacttggagaatttgtcaaccacgacaagaatacaatttttacctccggacacaagcaagccttcaacaaaatccatagtgatcgtttgccaagctcctgaaggcacatgaagaggttggagtaggcctgggtatttcactctctcaggtttagcttgctgacaagtggcacatgctgcaatgaactggatgacagatttcttcatgttcggccaggcaaacaactgcttcagccgatggtaagcgactgctatacccgagtgacccccaacagcagaactatggagagcagacaatatagactgttgaagtgtatgattgttaccaacccaaatacggcctttaaacttaagcaacccttcttgaagagtaaaatgaggaacaacatcttggtcaacaaccaacttagataacaaggtcttagccgaagggtccaacaaatatccatccattaccaaacgagtccactatggtgaacagactgagagagcatgtaatgtgatagcatgttgtcttctcgacaaggcgtcagcaactctattttcatgtccatgcttgtatacaatcttatattgcaaccccaaaagtttagtaaagacttttgctgccatggagtgttaagccattgctcattcaaatgcaccaaactcttttggtcagtataaataacaaactccccatgaagtaagtaagctcgccattgttccaccgcgaccaatatggctaagtactccttctcataggttgataagccttgagtcttaacaccaagaggtttgctgagaacgctaatggatgaccattctgcaaaagtacagctcccaccccattcttgcaagcatcggtctcaatagcaaaaggttggtgaaagttggataatgctaacaccggggctgagatcacagcttgcttcaaggtattgaaggagatttcttgatcttgagtccaaacatagaacacccctttctttcacagtgcatttagaggtttggcaataatagcaaaatgactgacaaatcgcctataataacccgccaaaccaaggaagctccttaactctttaacattggagggcacaggccagttcaacacagcatcaacctttgcaggatcagtatccactccagcagcactgatcacatgacccaagtaagcaatagatgtttgagcaaatttacacttagacttcttgacaaaccagtggtctttttggagaatggtgagaacttgggccaagtgagatacgtgatcgtcaaatgacctgctgtagactaagatgctatcaaagaagactacaacacacttcctcaacaaaagggccaaagaagagttcatagcgccctgaaaggtaccaggtgctcccgacaatccaaaaggcatgactcaaaactcaaattgaccatgatgtgtctagaacgctgttttaaactcttccctaggcttcaacctcacccgatgataccctgaagccaagtccaatgtggtgaaccaacatgcaccatgcaactcatccattaactgttcaaagatggggatggaaaacgggctttgaccgttaaagcattcaaatagcgataatccacacaaaactgaaaagtgccatccttctttctcaccaacagcacaggagaattaaaagatgatgcactgggtctgataatccccgactgaaccatttctgccacctgacgttcaatttcatctttcggagctggtgggtatcgatagggtctgatattaactgggctggcaccagcaaccaatggtatactatgatcacaacttctttctagaggtaaggacataggtttagcaaaaaccgactgaaactggttcaacagctgaacaatttcaggaggaagggtagcctcatcagtcagagcaacagacacttgagatagggaaatctgaaccaacaattcgtcaaccggctctacagtttccccttgcaagagcacttgcacaccatgataagggatcaacatccatcgttgtttccaatgcacttccataggactgaaagtctctaaccaatcaagtcccaatatcacatcaaaggattgtaatggcaacaccttcagatcaaaggaaaacccatacccctaaattgtccattgagcttgagtaaacacttgggagcaagtcataacaccttcattagccactttaacctggagacaagttggtaccaaagtaatgtcggttaacctggaaatcatagtgtgactgataaaagagtgtgaactgcttgaatccacaagaataacgatttcatactcctgtatagaccctctcaacaaaatggatcctttggcccttgatcttgaaacagcctcagcagatagagccaagaagagttgttcctcgtggactgaatcttctgatggagaagactcattcagaaatgcaggcataagatcccagacttcctgcagggcatgaagttgaactgtagtattgcagacatgtcccctatgccatttttcagcacaacggtcacaaagaccacgtgcatgacgataagcacggagtgcagccagtttttcatcagtgcttcgatcagtctgcatgagacgctgcttaggtaaggatctcggcgcactggcacttgctgcagcagtagttggttgaggaagaggcagggtcgtcttgtgctgggatttcgaccaaataccacgatcacccttgcagaattcactccgcataggtggagcagcgacctcatcctgcaaaaaagcgagggaacaggcaatatccagatccatcgacctttgaagcataacaacagcacgcatatcatcgcaaagaccatccacaaaccgtgtaacaaaatataacggatcaaccccagactcatacacagagagttgatctacgagagaagaaaattgttcaatatattgagttaaactacctaactatttgatgcgaaataagtggtgcaacaacagctgatactggtccttaccaaaccgttcgttcatcaattgacacaagagaggccaagacaaacggggatgacgaaacataactgacagaaaccagcacgctactgtaggcgacaagtgcatagaggcaattttgacccatgaattcagatcaacttgatatatatcaaagtaattcttgcactgggaaatccacaaccgtgggtgcaaaccctcaaaaactggaaagggcaacttagacagatgacccagcccatgacccgacatgtcacccgatcgtgcacgagatgcagccatatcaaacatagatccatgaatacgaggtaggggatgaggatgtggcatagtacgcgtacccttgaccaggtcaggaatataggtcatgacaaacccgaatccctgattctggaggtaatgtttgtcgcggtgcccaatagggccgtcggtgtagaagcccgcaagtgtgcgcggtgctcctggctccgggtggggaaggagtcccgaatccattgccgccgactcgataatcgaaagatccatttgtttgttcagccgccaaaggtcgagcttgatgtcatccactgccgcatccacggcaggccgccaggacaccagatccgcctgggattgctccaattttgccacatgatcctctttgttgtggacgagatcgccaaattgtttctcccatttggagtccagcgccacaaaacgcttgtccatctcctccaacacgaatttcatggatggatccataaattcgtgacggtgctgagagcgaatgcccaaaaccgtagtctctgataccaaatgttacgatctactgatatttgctgcgaggatgtattcgcttggtgaaaacataattacagagtaacagtagcagggaagacaatagcgagaggataagaagaaacttgaggaagaagaagataaacgtagttctgttacatcttggcttcgtcgtaggtctcagcgagcatatatcttcaggtcctccattctgggccctagaatctcacattggccttacgctggcgtgttccccttctcggcccaactgtagtcttctcttgaggcccaccagtctccacattgctctgttgctgttgtagctcctcggacacggctgcttctgcctgctgctgcacctggaggtcttctgaagtcgactcgcgtggagagacagtgctgacataaatatagtaatggtgcaacggctatacgacacgtgagggcctaatggcaagctagtgtaatgaaacctctccataaaataaatttaaaattaaattggaccctcctcataaagaataaatttaaaagtagcaagctagtgtgatgaaacccaccaaaaaataattttaaaattaaagtggactctttccgtaaaaaaataaattaaaagttaaagtggacgtattacccacataataaatattaaattgcgatcactgcactttatctttgccaaaaggctaagaatgttgagttgaaatggagacatgcatcttttttaatagctacctcggtcgcttatcctcctatatctagcgatgtggtattattgagaagtgtttactgcatgtggtttcgtgtcatgttgggtttgaatattttctcagggtcatctaaacgataacaacagtcaagaccacgggtcagattagaaagaaattgtggtacccaattttcaaaaaaagaagttgaagtttattctttctttgtttttctctttcgggtcccgtactactggggtttggagttttaggagtcatacatcagtagcagtagaatttttgtttgacttgtacgcgggggtcagaagcaagcgtgggattggttttgggccgttgatctcgatccggcggtgggaagcccacttctttcccccccaaaaccctagccgcccctccctcttgtttcccttgtgcagctgccccccctcttgtcccttgttttggccgccccccttcttgtatcttttggctgccgccccccatctccaccttcctcaagttcttgcagcccaccacaacaaccctagccaccgcccccaacttcccctcccaaggtgcagccccttccccgcttggatctacgtcgtgttggtgcaagtctccaattggattttggtggaaggaaggagggataaaagggggagaattcaaggtgattttgtgattatctttttgtattagtgctgcaatccaattggttatttgtttacctatgcgaatcggtagaggtgttgtccagaaattttgtgggtgggcgaacagcagtagtattatcagtttctggggatttttcgtgggttattagtagtaatcattgtgacaatcaggtagggctttgtcatacctttccaaagagtacttatgcgctaaattcagaggtatattttaggagttatcgctgtttgaaaccggctaggttgctgtccaaaaacagattgcagggtgtgtcttgtgggctgtttggggccatttagatgttggaatttaatcatcgtttgaatacaaaacttgtggggaattttatgtagatggtttgggagttttttttgttaccactactgtcataattttaaagatatgaaattgtcaagcagcgccactgcagttttggtgggtgatggggagagaggtcgctcgcgacgggtttggaatcgtgcgtatgtgcggcgttgtttatgagcgttggttatgtgaatttgtgcactaagttgtgtgtcaaaaacaggtggtggacctccgggtcgttcttagggccttgtccaaatttccggtgaaggcaagtaaaatagtgatggtttataccgttggttgatttatgtgtcctatacttgattacatccatgttaaatgtgttctttctcgtaatccattttgagaattattgcttgaagctaatcatgttttattatttacatatgttgaagatgttgttcgagcatgttatatgcattgattattatttggaaggaatggaattatatatgtttaacacatgttatttggggtggtctcatgttggtgtcatgcatagtgcatccatcattctttgcatggaagtttcttcgcgatcttatggtccaaccgtaccggtacaataagcatcatatgttgcccgagaaggggtatgatgcagcttcatatccttagaggtatggaggcagaagtcattactgcatctgtagccatgtgcattcacgggtgaaatgtggaacctgttatggtggtgtggatattgtggatattcactttgtgtttcattttggaactgagtaattgttatcttgtttacttgctgcaatttgatattcaagaaggaagttgtgaactatgtggttgttaaatcacggtttgtttacattgtcaaattgttatttgatcattttacttgctgagatgtgtcatctcacacttgcattgtttgatgcaggaacttgatctttgcttttgggaaaggagggaagtagcagcacggtcactacatccttaaataattgtaccactgcttagtaatgatgttaaacagtggtttcaagtcaagggggttgattgttatgaaatagtgcgtgccagggaattaataagttctagtccacttggtggctgactttcttttggtttgctgcattcattttattttggtcattaatgttcattactacctttgcatcctggttatacactgtggattacccatcttttacatcatgtataaactctatgtgcctctcgttatgctactttcaagggaggtgctgccgaatttttctttgattcctgtcttcatttcttttattatgttgtttgagtttgtagagagagtatttggtaacactcattgtgtgggagcattgaggtgttacagaaatatagtgacttctttttttacagaagggacgacacgacagtgaactaggcaaactgacataggagaaagagataacgaaaaccttaattttaggctcgaataaaaactatcaccggaaaaaaaacataaaatgctttcaggatatacatggttttggggagaataaactagttctatcaaatccttttttctagtgtgttccaactagcccgttaaggcgttcctagagtcaatctcgttaactactctaaattaatctaggaagataaagatcatataaattacacacaagaaaaagtaatagatatgtgttttcaatctagcaccaatgagtaaatttgtgtatgtgcattttaggcatggattctgtgctaaggggacacaagagttatactggtttggacagaacgtccttactttcagtcttcgatcgcttgtgctaccgacacctgattgctcgaagtggggttgcaagcgacagagagagggaaggatcccaagtctctgtgagtcgtttgtctaatgtatgacctgatcactagaggctctaagttgcttgtttgttcactctctgtgagcctaggggttttcggttgttctcctcaccccttctactagaggttgatcctattccttttataggccaagggaagggtggcttacatatatgttctctcggaagggagcataatgttagggtaaaagaaatggtttcacccctggttaaagtcttgtcgtgtgccgatatctcttcccgtgcgatcgcctgcagtgcctctgaatttgctggggacttttggtccgtgttggtgaaggaagcccgtgcgtcaccattatttatcctcttctccccacacccaccttctgcctttgtggcccgaccgccgaccttctttgtcgttgagtgagctcgtaggacgtcaggggactcagaccaagagtacataggtcatgagtggggctcgaccttagatttggtagggcgtcgaagggatcagacctagcatccttgggtctcgagtgggcacagaccaaggattcataggctacgagtgggaggaagaccgatgtgcacccacactgtgtcctactgcttcacgtaatcaatgtggcatgtacgaggtgtgcggcgagagcaatccgataggcacgtggcgcccgcttgggtggtcccccgattgatccgcctaacccctcgctccagcctccgcttcgcttcacccctggttcaatgcgcagggatcgttccgcagtgaggcggtttttactcgggcatgcgagcttattgttgtcttcctactaaactgtgggaccctgggggcctagggatttgatctccgacagtgtctcttgagtcactttggggagtgtgtctccctttgggctgatttggtgaccagggagcacaggaggattggaggggattgagggggaaattagttcatttccccctcaatcccctccaatccccccgtgattcacttgtcaccaaatcaacccttagtggcttccttagggtcgagcggtgaccattccatttttctcttgtttctcgatttttatgcttggggagcaaggattctctaggggtgctgctggttcttggcccccttctctccggggttaggattaaccctcgtccaggtggtacaggccgttagggctttcgagctaaaacttcgcgggctagggtgtttgcgcactatgccacgcgacacttggctaattctttagtatcagaccatcaggtggccagtgaacgttattttcttcagattgctgaaagggaaatagggttaaccatttcctataattaatttttgtggttgacgaccaacacaaacacatggactaactagtttgtctagaattcatgtattacaggtgcataaggttcaacataaaccaagaaagatatcaagttagggacacaatttaattggagcaaaatgacttgagtgtgctggaaaatggtgcactgaacattgtccggtgtgccagcggagcaacgactccctgggccaacggtcgactctgcaaaagcaatagtgtcgtgacagagtcagaagcgcagaagtcagagggcaccggactgtccggtgtggcaccagactgtccggtgcagctagaagacaaaggtctccaacggtcaactgctcaaaaccctaacgattgcgctgacgtggcgcacaccggacagtgcatagtgactgtctggtggcgcaccgaactgtctggtgcgcccatcgccaacagaattcagccaacagctagaagtggttgggaggctataaatacctccaaccacctcattcacttccatccaagccttctgaaatcttcattcattgcaagagcaaaagcccaacgctccaagacacaatcaaagcaatcaattctctcaaagtccccaaaatcaactctagtgcattagggcttgtgagaggatcaattgtgttcttttgttgctcttatcgcttggattggcctttttcttttcccttctatttatcaagtgacttgtaatcgaagcaagagacacctgtcggtgttttgggtccaaccgcacacccggggttgcccctcaaggtgtttctaggagtaggaaggtgtcgacgactgtagcaaaatggttcgtgccaatcgcacgagggacagtggacaagatttacaggttcgggccgcttagagatgcgtaacaccctacgtcctggcgagtatgcttggtgagcgtggttacaagagggctctctggattgaagacacatagagctgatgtgggtggctaagtaagatagggtcgatcgttctgaaggggtgccccctaggccttatatactcgaccgtggggtagtacacgtggatatgataacaacaagtagctaaaaggtaatgaacctcttgagtttatccctacgtaaccctcgccgacttatccccgcatggctccgttgcatgggggcttcagcgcgggaaagtcgggtctctgttgcgattcactcgctcgacgttgtgggccgtccgggtttgcaccaatccagcttcacgtcgctctgctttgttggttgtttctccccaggctcacgaaagaatgaccttacgatttattgggcccttgggcctttcgtgaggtcttttactcctttagtggacccgggggatatctatcccccaaaagcccccgatctttgggttaatttagaggtaatcagcccaaagatcccaggtccaacttgcgggtgttttgaagaaaaatgacttcctgctgccttctcttgctctgatcactcatttgaccgaagcttggtttcatgcttgtgccttagaggtcggcatttcaatttgtaggattttgaacttcattgggtgcaccggaggtgtacccaatgggtgtagcccccgagctttgagtagattttagaaaataatctactcgaaggtcttccccagaaattatctccatttgtgctcctgcatcttggttgagggttggtcttttaatcttgtcctacgccttagaagtcggcactatctcggcttggaatgataatccatggggtgcaccggaggtgcacccaatgggtgtagcccccgaccttcaaatggattttttaaggataatccattcgaaggtcttcctttcgtgcctctttgctgaaaattatccctttcgtttgtaaaaaattggcataaagctatttgcattatgctttggaggtcagcattatgtcatcaatattttgctgtagaggtcagcatatattttgtctttagcagccgagtttgcaatccgtccatatcttgctaggtgtgcaatttatttgcttctgcgactgattggacgtttgatagacgttctctgtcaagtcttcacgtcgcttctgtcggccatatcttgtactttgctggctatatttggctttcctctgatccttactgatatctcatttttgtcttgaggtattcactgcgtgccctgcacagatgtgaccgttttgaaaaatatactgataattcctgggcgtccccccccaatgggtgtgggcaagggacgacttggtacgctgagtgttttatccggctgcttctgagtagtaatgtgatgggacggcgggtgtaatcatatcctttgcgctgttgactggagtcccaatgggtgtaatgttgcatgaaacgacgtcagccgcctgacgtgtcttcagacgagtggaagtgcttattgaatgctttgcgactgttcagtgaccgcggttggaggtgagcggttgtctttcccttctataaataacaccgttgcccctctggttttttcacatctcttcgctgttctttactgcatccttctcttctctcccgtctgcttccggcatgggcaagagtaacaaacgcaagcgcgagccgactcctccgtctgaggacttcggcgactcggaatactcggaggaggagttctcctccgagtccgagggtctccggctcccgtctctcccccggcgtcgtctgatgattcagacgactcccaggggattgccgcggaagtctggacgtatatccgggccgtcgagcgctccgggctcgagggctcggatgagtcggagtactcctcggatgaggaggactcggacggcggcgaggacgaggatgacgacgacgacgacgacggtggcgactgcgacggtgacggcagcggcagcggcggggacgggagcaagggcagcaccaggggcggcaacagcaagggcagcaccaggggcggcagcagtaagggcagcaccaggggcggcggcggtggcagcagcagcaaggccagtggctaaacgccactggtctttagatattagtgtagtgtagttagaataatgtaatagtaatgtagagtagtatagtgtagtatagtagtagtagtaatgtaatgtagtaataatagggaagcatcaactcgcaaagagttgatttgtaagcttattgtcttcccttaatgaaagaatgacgttggcttcttcttgatgactcgctttgcttgattatggaactgattcttttgagatagtagatgaataacttgggcatcacattgacgcttccagaagtagctgccgagtaatcttgtagtctatatcaacgttttagaaataatgccgagcgactgaacgctatatcagcgtcttagaggcaatgccgagtgattgaatgtcgacgtcggcattttagaagtagtgccgagcgattgaaggtctacatcggcattgtagaagtaatgccgagcgattgaacacgagatcagcgctttagaagcaacgccgagtgattgaaggtcggcgtcggcgttttaggggcaatgccgagcgactgaacactatatcagcgttttagaggcaacgccgagtgattggaaagcgacgtcagcattttagaggtaatgccgagcgactgaacgcgatatcagcgttgtagaggcaacgccgagtgattgaaggtcgccatcggcattttagaagtaatgccgagcgattgaacacgagatcagcgttttagaggcaacgccgagtgactgggtggtgacgtcggcattttagaggtaatgccgagcgactgaatatgaaatcagcgttttagagtcaacgccgagtgatgaggtggcgcatcggctttttggaaataactgccggatgaccacgtggcctgctggggttttggaaataaccgccgggtgatgactggacactttttgaaacgatatctggctcgagaatatctcataagagttgcgcttttagccgcctttgctttccgtgccttagttcttgctttcccgcttccgaatcctctctgccattcgcctcccactctgctcgctggtagaatcgagatggcacccaagaggaagacctcgagctcgtctgctgtggtgattcctccaatcgaccccaacagccagttgcctttcacaggtaaccacatgtccatcatttctgaaactgaacttctccacctcgtatctatcggggttcttcctccgcgagaactccgttcttggcggatttgccatgggtttactgttccgacagaggatacccatgagtccgttgtttacgcccctttccttctccgcggccttggccttcccatctctccctttttccgcggcctccttgatttctaccatattaacttgacccatttgaaccccaattcaattctgcaaatctccattttcgttcatttatgcgaggcctttcttggcatgctgccacatttcggtttgtggaaatacttgtatcattgtcgccctgggatggccgggggacaacatcagttggtcgggggcgccagcttggagatgcgccgcgggaggaaaactgaatatctcgagatccccctcaaggacagtattaagggatggcgcctagagtggttcatagttgagaattatgggaattctctcccctcccggacgggaagacagccggacgttcgcaccccaagctagaccgagtctcccacagatcaggaagtagctgaggcaggtgtgttgctagctgaagttggactgctgaaagagaggggtctgactactgaagctgtggttactgattttgttttcaagaatattcagccactgaaagacagggcctatccatcttatctgtatcgagggctaaccgactcaactcgggttaccaacaggagaattccttctgcagacttggtgagccgacttgaaatgatcctcaggggcaaggtgtcaaatgttggtgctccagtggcgtactcggcctggaatctgcctcctcccaaagccttcaccctttttgtgtcgaatccacccattactgatggcagtttgggccttagagtgcgaccctctgctgaagaagttagtgctttggttgcctcgcttggggagattcctgatgacgaacggcaggttcattttgaggtgcccctgaaccctagtgatgcagagataagcgctatgcttgatttgctagctgaggattcatctgatgctgctcctgctggggcgttggtagtggcgcccctcccagaggctgatacgactttggatgttcagaagcctgtcagtgctcgcccgaggcgcccttgtcgaaccaatcagcctgatccttctgctgatgagcagaagaagaaaagaagacgcctccggcgagtatccagttttgatcaggacgctggtacctcggttcctgctactgaagaagtgcctgcgactggatttactgacgctgaccccaatgggtgtacccaatccgctgttgatcccaatgtgggtgccccatctgttgctgatcccaatgggggtgctgcttgtgttgctgatcccaatgtgggtgccccatctgttgctgatcccaatgggggtgctgcttgtgttgccaatgtggatgatgaggaggaagaaaatgagattcctttgactcggaaaaacagtcggcagttcatcgccagtggtgaaagtagtggagttccctctcctgctttgtctgccctcattggtctgcaagaactgtccctagccaactttgatcagactctggaggatatggtcccagaggacttgttatcggagccagtggatgatggtgcaatggaggcttgcgctgacgtgcccgatgctgggttgaggtcatcccgtgcctcgtcgaccttagagcgcgatctcgagggtcgggagactgacttggatcgccctggtcctatggaagtagctgagggcccgtcaaccttagaggtggttactgcagagagcttggacctcaagaatgttgctgacacatgcccagcccccgagggtgtcgccggggatgacttagctcgggtgaagagtgtaagccactgcccagcccccgagggtgctgccggggatgatccggctcaagtgggcagtgcaaactatgatccagcccccgagggtgcccgagcagggtctccttcctgtacttccatggacgttcatgcgggttctcctccacactctggctgtatggtggtagctcaaaccttggaccagggagtcgctttagagggcagcgtccccgctgatcgagtgtttggctctgttgaaggcaccaagctgattcctactggttcattgcaagctgcttcgggtggtggccttacgcctagttatcaactgatctctcctgatttggggatcccttcgttcttttccaacctccaggtactgtgatgtattttagcttgattttcacattgtatgaactgctgtcattacactcatctgttttcctcatcagactttggtggatgggatggctagccagctgaggctacagggtgcttccgtcccagaagtagcttcgtctcttgcatgttggaatccagtgtcacttcaacatcgcgtctctgaattggaggcaaccaacgctggttagtgcctttttgcttctctttgccttcactgtggacggctttaccttctgaccccgttttgtttgattatctcttgctaggaatgactcggcacatttcaattattgaggaaaaacattcccgagatcaggttgaattggtccagcggtgtgctgacttcgaggagaagtactctcagagccaaactgaactgggtcaagtctctgctgccttggatgacgccaatgcactgagttcttctctccatgctcagctcgattctgaaaaggtaatttacaaaactgtgctttgccttgttgtgttcctattacttgcttggtttttgaaggagttgatttttgctcgcaggaagaaaaacgcaccctcgctgcctctcgtgacagtcttgacagattgtatcgtgattctagcaactcgctgactatcttggagaggagtcaccgctttacaatggaggaattggataatcaacgctgtaagctgcagtagtccacggacgaagtgacccgcctcaagcagttgatatgagcaaaggatgctaccatcaaagaactccgagcttacaagaaatccattgttcaagagttagaaactgctcgactggctgctaaggttgccgaagagacttctgttactctcagagcccagcgcgacagagccatggacaaggctattcgggcgggacgaatcttgatgaggagacccggcgtggttgttcctgaagacataagggctgatgtgaatgctgccccctgattcctcgagtcgcccttcttcgtcggtcgcacctgagaaaaacattgcgaaatagagaaatattttgtgtgctttgagcgcgcggttagcatgatcgagtattagttagaggacatcagttcagcattcgaatgatataattactctcttattgtttcagaattcatcagttcgtaaatttgcagcagtgaaatgacgcgcgatgattatgaagtttgtttgcgggatatagaagtcatcccctgaattgcataggcatgagcatgttgcaccggcttaagtcgccactgactttagccgattgctccgttagtagggcatagtggtcaccccgagttaagtaagcgtgagcatgttgcaccgccttaagtcgtggccgacttaagtcgattgctccgttagtagggcatagtggtcaccccgagttaagtaagcgtgagcatgttgcaccgccttaagtcgttgccgacttaagtcgattgctccgttagtagggcatagtggtcaccccgagttaagtaagcgtgagcatgttgcaccgccttaagtcgttgccgacttaagtcgattgctccgttagtagggcatagtggtcaccccgagttaagtaagcgtgagcatgttgcaccgccttaagtcgttgccgacttaagtcgattgctccgttagtagggcatagtggtcaccccgagttaagtaagcgtgagcatgttgcaccgccttaagtcgttgccgacttaagtcgattgctccgttagtagggcatagtggtcaccccgagttaagtaagcgtgagcatgttgcaccaccttaagtcgttgccgacttaagtcgattgctccgttagtagggcatagtggtcaccccgagttaagtaagaatgcaagtcaatcgtaaacgaactgagtatctttgaaacctcttttttattaatgacatatttccactttacagaatacatcgtcgtcccagcagtttttgaaatacagctagggataaaactttctgaggtgttctatgttccaggagttcccaacttctgtgccatccatctgagtgagacgatacgatccgggccgagtgacttctgctaccatgaagggtccttcccataagggcgataacttgtgtcgtccctcccccgttagaattcggcggaggacgagatctcctactgagaaggatcgttgtctcacagccttgtcgtgatagcgccttagagtctgctggtaccgtgctgattggattaccgcgtttagccgttcttcttcaagtacatcaatgtcctccagcctggtggcctcagcttctgctatgctttcgaagatcaaccttggcgccccaaacttgagatcagcgggtagcactgcctccgacccatagaccatgaagaaaggagtgtttccatgcagggctcggctaggttgggttcttaggctccaaacgacatagggcaattcccttatccactttcctacgaatttttcattcttgtcaaagacctttttcctgagtgcctccagtatcatcccgttggctcgctcaacctgcccgttggctcgtggatgtgctacggatgcatacttgatctgaatgctcttttgctcgcagaagtcgaagaactctgaacttgtgaagttggatcctaagtcagttatgatgctgtttggtatcccgaatctgaatattatgtcttgtatgaattccacggccttagcagaggttaaagaagcaatgagcttgatctttatccatttagtgaatttatcgattgctaccaatacgtgagtgtatcccccttgagctttcttgaaaggtccaatcatatccagtccccagcatgcgaaaggccaagttactggtatggtctgcagttgctgtgctggcatgtgttgttgctttgacaagtattggcaagcttcgcacctctgaactaactcggctgcatcattctttgctgttggccaatagaatcctgacctgaagaccttcccgactagtgttctggaggctgcatgtattccacattgcccagcatggacctcctccagaagttgcttcccagtggacgggaggatgcacttcatgaagacacctgacgcaccccttctatacaatgtctccccaatgagtgtgtagtgagtcgactgcctggcaatgcgctcggccgagttcttgtcatctggttcttcttcattttttatatacttgatgattggccttctccagtcatcagagtctgactcaggttgatctataatgttgcactcttctgtttgatctattgagatactcggctgcagtatttcttgcacgaagactccgggtgggacctgagctcgactggatcctagcttggacagtacatcggctgtcgtgttccggtctctttctacatgatgaaattccagaccctcgaatttatcttccagctttcggacggcagtgcagtattttcccattgaatcacttgaacaatcccactccttgtttatctggctgatgactaccagagaatctccgtataccatcaatctcttgacgcctaatgagatggcgatgttcaatccatggatcagagcttcatactcggctgcattgttggaggccggaaatagcagctggagggcatatttgaggtgctcgcctccaggtgcggtgaagagaattcctgctcctgctccctgtaacttcagcgagccatcaaaatacattcgccacacttctgcagtctctgggttatctggtacttgctgctcagtccactctgatacgaagtcaaccagtgcttgagttttgatggcagtgcgaggttggaactcaatgtcgtgagatcccaactcacaagcccatttggctatccggccaatggcctccttgttgtgaagaatatcccctattggaaagccagtgactactatgactttgtggtcatcaaagtagtgacgtagcttgcgggcagttagaagtactgcgtataatagcttctgaacttgaggatactttttctttgaggggcctagaacttcactgatgaagtaaacaggatgttgcactgggtaggcatgtccttcttctactcgctcgactaccaacgcggtgctcaccacgtgagtcgtgcaagagatatacagtagcagatcttcaactggttgagctgacgtagcacgtcagggtggtttcagtactggtggtgttgtcaagaatttcttcagcgcatctagagcttcctgtgcttctgaagtccactgaaacttatccaccttcttgagtagcttgtaaaacggcaaacctttttcccctagcctggatataaatctgctcagagctgccatacatccagtaagtcgctgaaccttcttttgtgatcgaggtgcttccatcttcatgatagcttcaatcttatccggattagcctcaattcctcggtggctgacgataaacccgagtaactttcctgccggtaccccgaaaacacatttttcaggattaagcttccatctataccgtctcaaactgttgaaaaccagctgtaagtcttcgatgaagttttctgaactctccgttttgattaccacatcatctacgtaggcctccacacgcttgccccagtgatcggctaagcacgtttggatggctctctgataagtcgctccagcgtttttgaggccgaacgacatggaggtataacagaaagcaccaaacggagtgatgaacgccgttttttcctcgtcttccttcgccaaactaatctggtggtatccggaatagcaatccaagaaagacagcacagaacatccagcggtggagtccaccacctgatctatcctcgggagcccgaagggatccttcggtcagtgtttgttgagatcggtatagtcgacgcacatgcgccaatccactttattctttttgagtacaagaacagggttggctaaccactcggggtgtaacatctctctaataaatccagccgcgaccaagcgagctaactcggcgcgaatggcctctctcttgtcgggcgtgaaacgacgtagcttttgccgaatcggccttgcctggggatagaccttcagtttgtgctcggccagttctcttgggactcccggcatatccacaggttgccatgcgaatacatctcagttatcttgcagaaactagacgagcgcgctttcctatttgtcgtccaagctggagctgatgatggcagtcttgcgttcatcagcgaaccccaggttgatcctcttggtttcttcagtcggccgcatagaggtcgcggcctgagcttcgtttgccggtactgcgaggtcctcttcaggcttagagttcgccagtgtcgaagaaaccgccgacggcttggtggtgagggctgcttgaatggccactcggaaacactctgcggcgccttggaagtcggcgcgcacagttatgattccttgcggccttggcatcttcagtatcatatacgtgtaatgagggatggccatgaatttggccagtcccggcctcccgatgatggcgttgtacccgcagtcgaagttcgccacttcgaacctcaggaactcggttctgtagttctccggagttccgaaggtgactggcatgtagatgtggcccaacgggtattccccttccgtcggcacgatgccgaagaaaggagtgtccgactcgtggagctctttgaggtgaactcccaagccttggagtgtccgggggaaggtgacattgatgctgctccccccgtccactagcaccttctttacccggctctctcggatcaccggatcgacgaggagcgggtatttgcctggatggtcgaagttgagccattgatcctcccgagtgaaagtgatcgggtgttccgaccaccggtatggggcgggaggaccggtggtcgccaccagtatctggcggtcgttgagcttttgttgtcttttgttctgctgcgacccatgtccgccgaagatgacgttgacctccctgtcgacgcgtgggaaagctcctcctcctccctcctcctgctgatggggttgtcgtggttcatctggtcctcccctcggcggaggaggaggtagaggttggaagggtcggccgtgtccgacggaatgcttgaagtcccgacagttacgaaaagtgtggcgcatgtccttgtggtacgggcactgggcgtcgaggatgtcgtccagcgtgcgttcgcctccacgaggtcctcctcaggcacgagaggcaggtggtccggcggcgtgtacttcttcgcgaggcctcttctcccatcgtttgtcgggttgctggttcgcgtcgcgtcgtggtgctgccggtgcgggctttgttcctccgatgaggtcctgggcccgctcgtcggcggtgatgtagaggtcggcttcccggaacagctcctcggaggtagtcggcgctttctgtagtatggctcggacgaaagccgagtcgttggatcctctgtagaagtcctcgatcacggccgcctccgtgacctcggggatacgatttctcatggtctggaaccttttgaggtacgaccggagagtctcatccccccggcgcttgatggatttgaggtcccacggttgcgccgacttgtcggagagggactggaagttggcggtgaagcgtcgactgaagtccccccagtcgtcgatgtagtgtcggggtagatgtcgcagccattgcagtgcgtcttgcccaaggacgatgggtaaatacgcggtcatcacgtcttcggacgccccggcagctcgagcagcggtggtgtagacggctagccaaccccctggatcctgcttaggttcatatttgtcgacattggataccttgaagttgggaggccattggatggccctaaggcgcggagtaagagcggacactccgcacgtgtcctcctgtcgtcggggatgatgtctgtcccggggaggggagttgtggttgtggttcctcgaccgtccccgggtggtaccgccagttgaggccgttgccgactcagttctggtggcctggctctgagccgggatgccatgatccctgtcgtactcctcccggcggcgaatctcgttctcatgccgccgttcgcgcgaagcattgatggagcttcgcgcgtctcggcgactgttgatggcgtgtcgtagatcgttcggtgggtgagcaagcggtagaagatggttggccgcctgggtgaacagtcgtcggtagccctcagcgtcgggagtctgaggaagtccatcagctatccgagctagtacccctccgacttcgctcggcgtgttcatagctcgggcgaagtcgggattcaggttgcgcccgaagaatggattctcccggcgttgccttgcatcttgctcggcttgttcctgagcccgtcggcgatcacatcgtcgggagttccttcgttctctgaagacgcgttcttccggagtttctcctatctccgagatctcgtctcgcgagacaggctgctccggatcccgttctccggccgcgtgatgtcgccgaacgttcctgcgtcgattcctccgtcggcgggattctcgttgaggcggttcctctccgggcgcggtcggttcgtcgtcggagatggtgggcgactccactctcccgatgaagaggacgtcggggtagaatggtgctgctgtcgtggcgactttctttccattctcctttgaagccggaggaacggaaagaacgacttgcttttccctggtctccttcttcctcgcgatccgtgtccattcttttgtcggggaagtagacaacggagtcttccgggtcagcgagccctcggcccccgactttccggagacgatcttcttccgaagagctagaggttgcgcctctccggcattttcggagttcgttggaggagacttcttttccggcggatccgcgatacgatgtagaattccctcttcatccgctacagatgagattgtcccgaagcagaatacggatccgggacgcatggtgatcttgctgtagaaggtgacggccattgagctagcttggatcgtcgacacaccccctacctggcgcgccagctgtcggtgttttgggtccgaccgcacacccggggttgcccctcaaggtgtttctaggagtaggacggtgtcgacgactgtagcaaaatggttcgtgccaatcgcacgagggacagtggacaagatttacaggttcgggccgcttagagatgcgtaacaccctacgtcctggcgagtatgcttggtgagcgtggttacaagagggctctctggattgaagacacagagagctgatgtgggtggctaagtaagatagggtcgatcgttctgaaggggtgccccctaggccttatatactcgaccgtggggtagtacacgtggatatgataacaacaagtagctaaaaggtaatgaacctcttgagtttatccctacgtaaccctcgccgacttatccccgcatggctccattgcatgggggcttcagcgcgggaaagtcgggtctctgttgcgattcactcgctcgacgttgtgggccgtccgggtttgcaccaatccagcttcacgtcgctctgctttgttggttgtttctccccaggcccacgaaagaatgaccttacgatttattgggcccttgggcctttcgtgaggtcttttactcctttagtggacccgggggatatctatcccccacaacacctaagtgtgtggtggtccttgtggggtctaagtgacccaagagattaaggaaaaggttcactcagtctaagtgatcgtttgagagagggaaagggttgaaatagacccggtctttgtgacctcctcaacggggactaggttctttggaaccgaaccttggtaaaacaaatcatcgtattcactcgacttaattcttgtttcatttgttttcccctctctaacgtttccttgctattgtgaatttgagttggctcccatacgtcatctgtaatccttgagcaactcctagcaagagagatattcttttggacttgaatttaattctaacgctaacccccgaccttagtgtgtgtttaagtttataaatttcagattttgcctattcacccccctctaggcgactttcaattggtaccagagccagtgcttcattaagagtctaaccaactcgaagtgatgtctggagatcacgccaagagggagatcatgaccggcgaaaaggccacaagcttggggaggactctctcaagggagtccggcaactaacacaagaaggaatcctcttcctccatcaagtcgcatcggagaggtgacaagaagaagaagatgaagaaggtggtctactacgagaccgactcttcgtcaccctccacatcaagctccgagtcgtccagtaatatgccctacgctattccccatatttcaaagcgcgctccattactttccgttcccttaggaaaaccaccatattttgatggagatgattattgcatgtggagtgataaaatgaggcatcatctaaccacactccacgaaagcatatgggacaacattgaatttggagcgcaggtaccaaaggtgggggacaaagactatgactcggatgaggccgcccaaattaggcactttaactcccaagccacgtctatactccttgcctccttgtgttgggaggagtataacaaagtgcaaggtttaaagaatgccaaaacaatttgggacatcctcaaaaccgcgcacgaaggggacgaggtgaccaagatcaccaagcgcgaaacgatcgagggagaactcggtcgattcatcctcaacaaaggagaagagccgcaagccatgtacaaccagctcaagaccatggtgaaccaagtgcgcaacctcgggagcaccaaatgggatgaccatgagatggtcaaggttattcttagatcccttgtatttcgcaatcctactcaagttcaattaatacgtggggatcctagatataaactaatgtctcccgaggaggttattggcaagtttgtgagctttgaactaatgatcaaagactccaaacacattgtcaacttggagcaaggtgccacctccacacccgaggtgcaacccattgcattcaaagcaacggtcaacagaagaagagaaggagtctacatcaagtaggcttccaatcgacacctccaagctcgacaacaaggaaatggcgctcatcatcaagagtttctgccaaatcctcaagcaaaggaggggggaggactacaagccccactccaaaagggtgtgttatcgatgtggtaagtccggtcactttattgctaaatgcccaattctagtgaaagtgacagggacgaagacaagaaagggaataaaaaggaaaagaagagatactacaagaagaagggcggtgatgcgcacgtgtgtcgggaatgggactccgacgagagctccaccgactcctcctccgacgaggacgccgccaacatcgccatcaacaaaggcctcctcttctccaacgtcggccacaaatgtctcatggctaaggatggcaagaagaagaaggtatactctagagccaccccaaaatatactacatctagtgatgagggtagctctagcgataatgaggatgatttactttctctctttgccaaccttaacatggaacaaaagaaaagattaaatgaattaattgaaaccattaatgagaaggatgacatcttggaatgccaagaagacttgctcgttaaagaaaacaagaaatttgttaagttgaaaaatgcttatgctcgggaaatagaaaaatgtgaaaacttatataaggagcttagcatttgtcataattcaatttcaagtcttagaactgagaatgctagtttagtttctaagattgaaaagttgaatggttgcaatgattcaatttctagtcttagaattgagaatgataaattaaatgctaagattgaggaattgaatgcatgcaaaccatctacatgtactgttgatcatgttactatttgtaatagatgtagagatgttaatattgaagctatggatgatcacctttccataattaaacaacaaaatgatcacatagccaagttaactgctaaaattgccaagcatgaactagaaaatgaaaaatttaaatttgctcatagtatgctttataatgggagacgccctggcattaaggatggtaatgggttcctacaagggaaccaaagcaatgtcaaacttaatgcccccaaaatattgtctaattttgttaagggtaaggctcccatggttcaggatagtgagggttacattttatatcctgcaaactatcacgaacacaaaattaggaagattcatactatatgaaacctcacaatgtttctcatcatgcattcatgtataaaaataaggcttctagctctaagcataccactcatattaaaatgcctaaaacgaaaattcctaatgcatcaaatgaacataacatttcatttaagacttttgatgcttcatatgttttaactaacaaatcgggcaaaatagttgccaaatatgttgggggcaaacacaagagtcccgagacttgtgtttgggtacccaaggtgcttgtttctattgtgaaaggacccaagaccatttgtgttgtaggtttatgcatccggtggttcaggttggataatcgatagcgggtgcacaaaccacatgacaggggagaaaaggatgttctcctcctacgagaaaaatgaagatccccaatgagctatcacattcagggatggaaatcaaggtttggtcaaaggtttgggcaaaattgctatatccctgacattccatttctaatgtttttcttgtagactctagattacaatttgctttctgtttctcatttatgcaaaatgggctacaactgtctctttactgatatagttgttactgtctttagaagaagtgatgattcaatagcttttaagggagtgctagattgtcagctatacttagttgattttaatgataatcaagctgaactagacacttgtttaatcgctaagactaatatgggttggctctgtcatcgccgacttgcccatgttgggatgaagaatcttcacaagcttctaaagggagaccacattttaggactaaccaatgttcattttgagaaagacaggatttgtagcgcatgcaaagcagcaaagcaggttggagtccaccatccacacaagaacataatgacgactgacagtccgctcgagctactccacatggatctattcggtccgatcgcttacataagcattagcgggagtaagtactgtctagttattgtggatgattattctcgcttcacttgggtattctttttgcaggaaaaatcacaaacccaagagaccttgaagagattcttaagacgggctcaaaatgagttcagattgagaataaaaaagataagtagtgataatgggacggagttcaagaactcacaaatagaaggttttcttgaggaggagggcatcaagcatgagttctcttctccctacacaccacaacaaaatggtgtagtggagaggaagaatagaactctactggatatggcaaggaccatgtttgatgagtacaagacaccggaccggttttgggcagaggcgattaacaccgcttgctactccatcaaccgactctaccttcaccgaatcctcaagaagacatcttatgaactcctaaccggtaaaaagcccaatgtttcatattttagagtctttgggagtaaatgatttattcttattaagagaggtagaagttctaaatttgctcctaaggcagtagaaggctttttactcggatatgactcaaacacaagggcatatagagtcttcaacaaatccactggattgattgaagtttcttgtgacattgtgtttgatgagactaatggctcccaatggagcaagttgattttgatgaactagatgatgaagaggctccgtgcgtcgcactaaggaacatgtccattagggatgtgtgtccaaaggaatccgaagagccttcccaaacacaggatcaaccatcatcttccaatcaagcatctccaccaactcaagatgaggatcaggctcaagatgatgaagatgaagatcaataggatgagccacctcaagaggaggacattgatcgagggggagatgaagataatgaagacaaggaagatgatcaagaaattaaggatcaaagaccaccacacccaagagtccaccaaacaattcaatgagatcaccccgtcaactccatccttggtgacattcataaaggggtaaccactagatctcgagttgctcatttatgtgaacattactcttttgtttcctctattgagccatataggatagaggatgcactaagagatccggactgggtggtggcaatgcgagaggagctcaacaacttcacaagaaatgaggtatggcatttagttccgcattctaatcaaaatgttgtagttaccaaatgggtattctgcaacaagcaagatgagcatggtgtggtgataaggaacaaagcccgacttgtggccaaaggttattcacaagtcgacggtttgtactttgatgaaacttatgcacccgtagctaggcttaagtcaattcgaatattacttgcctatgctacttaccatggctttaagctttaccaaatgtttgtgaaaagtgccttcctcaatgaacctatcaaggaagaagtttttgttgagaaacctcccgactttgaagatagtgcgtaccctaaccatgtttacatactctcaaagacgctttatgggctcaagcaagccccaagagcatggtatgaatgcctgagagattttcttatcactaataggttcaaagtcgataaagccgatactactctctttactaaaaatgttgcaaaagacttgtttatacgccaattttatgttgatgatattatatttgggtctactaacaagtcaacttgtgaagagtttagtaggatcatgatacataaattcgagatgtctatgatgggagagttgaagtatttccttggatttcaaatcaagcaactccaagagggcaccttcatcagccaaaccaagtacattcaagacatacttaagaagtttgggatgaagaatggcaagcccatcaagacacccatgggaactaatgggcatctcgacctcgacacgggaggtaaatccgtagatcaaaaggtataccgatcgatgagagattctttactctacttatgtgcatctcgaccggatattatgctttctgtatgcatgtgtgcaagatttcaggcaaatcctaaggaagttcaccttagggtcgtgaaaagaatcatgcgatatttagtttacactcctaagttcggactttggtaccccaagggatatacctttgatctaattggtattccgatgccgattatgccggatgtaaaattgataggaagagcacatcagggacttgtcagtttctagggagatccctggtgtcatgggcttcaaagaaacaaaattcagtagctgtttccatcgccgaagccgagtacattgccgcaggccattgttgtgcgcaattactttggatgaggcaaacccttagggactatggctacaaattgagcaaagtccctctcctatgtgataatgagagtccaatccgcatggcggataatcccattgaacacagtcgcactaagcacatagacatccggtatcactttctgagagatcaccaacaaaaggaggatatcgaaatagcttatgtgagcacccacaaccaattagccgatatctttaccaagccattagatgagaaaacctttagcaaacttaggaatgagctaaatatacttgattctcggaactttgattgagacattgcacacatagctaatgaatatacgactaatgtgctttcaagtgcatttctatacttagtcgtagattgaaagggaaatggagttttcggcaaagacaaggcttccactccaactctgacggtatcatttattctttgtcgttactcatgtcactctcattggtatgaatcttcactcatacttattttaccatttaagagaacgtgttaggccccaaagggggagaaaatgcaacgagggctctcaagttctccgtttttggcgattaatggcaaaggtggagaaaatattaagcccaaagcaaaaggaccgcaccaccatttaaaaaaaattcaaaataaatttcacgggtcactagcaaagtctaggtaaaagtagtatagaggcttccatgcatcactatatgatggtgcaccatcacattgccattctcatgaacaccttctttgtgacatgtcatatgtttggttgtatagctagagacatgcaactatttcatacgatctttaaggggcatcatttgaagtacgttatgtggaaccttggtcatcacatcctcatcatcatcattcacaacctcaatgtacctcaatttgccacacactttacacttctcctctttctcattacctttctataaaagcatataaccatctttatacacatcaaccttctcatatggcatgcttctttgaatggtatatgtctttgggcatcttgtgattttccagaaggatatcgctgatcaaatttataagctccttataacatttacttgagaatgcaaacttggactttatagccataagtcgggtcacaaaggcgagggtggacacaattgtgtgttcgtgtattggctcttttgaagctctaaggagctacaagaaccttttaacctcctcggtcattgaatcctctaaatttgggtcatgctatgagagtacatcattaaccaccttttccatcctatcatcatcaattgtatcatcatctatctcttgtgttgttgcttgtgttgtcacttgtgtctcatgctgatgttgtgaattatcatggtgtcaccacatctcgtatcttcatatgaaaccataggtacaaaggtggagtgttatcattctttagtccttgcatttatagttgtggcaatttgtacatgggcataacacatcagtacccgttgtggtttcttacaaactaaagccacacccaacaaattcctaagttcttcaccatctaatcatgagagtgagatccaatcttattttaaccataatacatccatcgacgatcctcactcataatgtaaagggtagagagcatgtgttaccttgtcagcagaaggttgaagatggcccaacaacaccgcagtggcgcagatcaggtggtggcgaggtcgacaacagcgcacatacgccagtgtcctgtgggaaggcgtggcatggtggggtagccacgatagtggtggtgtgcggcaggtgtggaatgcaataatagactgggcgcgaggagggcaatgcatggctacacaacgtgacatgatggtgtgacggtgagaggctgcgcaaccgtagggggcatgcagcatggggcagcggcgtaatcacgatgtgcggcgtgagaagagcagcatgtggcgatgagatatgcgagcaagacggacgcggctagcgggcgcaactcatcgagccttgtggctaggctggatgggtttattccactaagagcaactccagtagttctctaaaagacttcctaaatcaataatttaggtagttaacataaaaactattctccaacagttctctaaatgaactttctaaatttaacaacttgtcatctaacctcattttctctctacatttggcaatcatttaacaactccctaaacaaaaatattgactgcattatgtagtttttgtgacttatttttttatgtggatagatacaaaacaaaattacaacctatatttagagaactattggagaactcacatttttttactccaaaagtcatttagcaacttcttaaatctacgatttagagagctaaaatttacacaactattggagttgctctaactttcgttgactactgacacaacctatggaagtaatttgtggctttcatggttttgttagtaggtaacaaaaataattaattttcatcagtaatcgacacggtcgacaaaaattatgaataacttttatcggttgaacgacgaccgacagaaactatttaattactgtcgactaccctaaatatcgacaataattaacggggccaacgattttttagttttcatgtgttgtataaagatggtcatgcgttgttgtcgttgccaaaagggttaggaataaaaaaacagttcagttgggttatttttaaaatcgtatgtataaatagtaaatggagaatggctatattcaaccatggaatctcttcccaagttggaggctcgaggtgaatcttggagattcccttccattgttttcaaggacaggaaagtaattgttctttttatgacaatttttataggatctttatatataacagatctatgcttctaatgctatcagtcttgttttttgcccttcgtgttcaccaagtgccactattgtttatggctcaattaagaaatgtgttggcggctaaagtggctcttcaattgtactttgggccgtcatttggagcagacaaagctgcatgcaaggcaaaatggcagagatgttgttgttgcattgcattggacctgaatgcgtccaactacaaagggaatgaatatacgtgctgatcaaatggttgctccggtcagattgttagtactagtgcacaagcaagctagtgcggcggctgattccttgcatgtgaaaaagctttttgtcgtcatgcatggtagtagttactcgtatggttctttaattacgcttaggactgtacttggaccggttaaattagattattattagttctgtgaccgagatctgattgccatgaactgtacttgactgtttaatttaactaaaaaatatactatctgatattttcatttctctagatagtcatggagtatatctgtatatgtatatattaaaaataatgtatcttaaagagttaaagcgttttattatttagaagaaaaaaatatttatcatcatcatatattgttgattcaaccgtgtgatcgggacagattcagcctaggcgctaggggtgcttgagcaattaatgagcacccctaccctcatgttgttcatatagaactttcatgaagaatcccttgaaattctaactatagatgaaaaaaagataaaaacgacaagaaaaaagagaaaggaatgaactctctcatgatcctggattggtccctgatcattgacagtgatgactgatatgaatacctatactttgacggcgaccattggcctacgatctgtatctcctgcacaccgtcacctttacacgcatgcaatggtcttgtggcacaactttcgagatggaatattcctactgtgcatagctaccatacacacacacgcttgtgcaaggttgattcctctgcaggcagtactcgtgtccccctcctgctgattctcgacttgcactagacaaatgcatccatatttatattagtaggcaatcaaacttggaatattcacgagaattaatataagaaattaatcttttccgctttgtggtacaataatgtataaattagtagagttttcagtaaggtacagtagtaggccaaacatatgtacgtcagtacgtgtagtacttgactctacatgatgtacaacattatcactatcgaacacgactactttgtcgtcgagtgtttcagacactcggcaaagctcagaaaacactcgataaactctttgccgagtgtgactttcagtaaagagatctaggtgaattatatatcggcaacgacttctttgtcgaatattttttgtcggacattcggtaaatgttttaccaagtgtcacctgttactcggcaaataaaagtcgctgtcacggcgccaagtgacgatgacgaagcctttgccgagtgtcctccctgacactcagcaaaggctccctctttgccgagtgcctgctggactagcgctcgacaaagaaggctctaacgggtccctttgcgagttcctttgccaagtgcttcgggagccactcaaagggagctttttcttgctgacggcgctttgctgagagccctttttacactctctgcaaagaagtatccttttatgctgagagtttggctctcggccggcagaaactctcttcgcctagtgactttctacaccaagtgtagtatttggcaaagtatgttttgccgagtgcccgataaataactcttgacaaagagctagacactcgacaaagagtcgaatttcagtagtgtatgtaacatttaggacgtgcacttctttttaaaattttgtgacaaacactcctttttttacatgagcgtttgtaaagtacttcctcttttaaattataagacgatttgattctctctctctttatatatatatatatatatatatatatatatatatatatatatatatatatagtcgaggtcttccaatagttacaccaaacctcagccacccgctggaccgtgcctaacacctaggcgcatgcggtaggttgcgtcccaacgcgcatcagtcaaacctccggtccaacacctaccctccagcgtgggacacacacataaattgtggttctgttttttcgcaaatagcgtaaatagttcacagaaaaaacgtaaatagttcataaagatagcataaaaaccccacatagccactagaccacgtccacacgcctaggtgcatgcatgcagatcctattcttatggtagatccgataattatagcaggtcatgggaatttcccttacatgcacgcaaaaatttcatggctccataaatataggatcgctccaactgtcatgcagctaggctcattaaaactagttttatgatatatacttgtcggggaccataattaggggtaccctcaaggctcctaattctcagctggtaacccccatcagcataaagctgcaaaggcctgatgggtgcgattaagtcaggaatcggtccatacgagggactcgatcacgcctcgcccgagcctggcctcggacaagggcagccgaccccggaggatctccgtctcgcccgaggcccccctccagcgacgaacgtgttcccggctcgcccaaggccctgtcttcgccaagaagcaaccctgaccaaatcgccgcgccgaccgaccaagccgcaggagcatttaatgcaaaggtggcctggcacctttatcctgacgcgcgccccccagccgacagagccgaagtgactgccgtcacttcgccgctccactgaccggcctgacaggaagacagcgccgcctgcgccgctccgactgcggtgccactcgacagagtgaggctgacaggcagtcaggcccggtcgaaggcaccataggaaactccgctccgcccgatccagggctcggactcgggctaagtcccggaagacggcgaactccgctccgcccgacccagggctcggactcgggctaagtcccagaagacggcgaactccgcccgacccagggctcggactcgggctaaagtcccagaagacggtgaactccgctccgcccgacccagggctcggactcaggctaaagtcccggaagacggtgaactccgctccgcacgacccagggctcggactcgggctcagccctagaagacgacgaactccgcgccgcccgacccagggctcggacttgggctcagccccagaagacgacgaactccgctccgcccgacccagggctcggactcgggctaaagtcccggaagacgacgaactccgctccgcccaacctagggcttggactcgggctaaagtcccggaagacggcgaactccgctccgcccgacccagggctcggactcgggctcagccccagaagacgacgaactccgcgccgcccgacccagggctcggacttgggctcagccccagaagacgacgaactccgctccgcccgaccccagggctcggactacgccccgacctcagccgacggtctccgcctcgcccgacccaggggctcggactcgacctcggccacggaagacagactcgacctcggcttcggaggagcttccacatcgcccaacctagggcgcagaccagccacgtcaacaggaggcgccatcatcaccctgccccgagctgactcgggccacagggaacaagaccggcgtcccatctggctcgctccgccagataggcaatgatggcgccccgcatactctgtgacgacggcggctctcagcccccttacggaagcaagaggacgtcagcaaggactcaaccgctccgccagctgtccctccgtcaggctccagcactcctccgacggccacgacatcacaccagcagggtgtcaaaatctctccggctgccacgacgacatgtacttagggcgctagctctcctccgctacacacgtagcactctgctataccccccgttgtacacctgggtcctctccttacgcctataaaaggaaggaccagggccctcttagagagggttggccgtgcggggacgaggacgagacacgcgctcgcttgaagccgctcgctccctctcccgcgtggatgcttgtaaccccctactgcaagcgcacccgacctgggcgcgggacgaacacgaaggtcgcgggattcccacctctctcacgccggtctccggccgcctcgctctccccccttcgcgctcgccctcgcgctcgacccatctgggctggggcacgcggcaacattcactcgtcggctcagggaccccccggtctcggaacgctgacagttggcgcgccaggtaggggcctgctgcgtgttgacgaacagcttcccgtcaagctccagatgggcagtctccagcaacctctccaacccgggacgttgctccgtttcgggagtcttgagttcatgtccctcgacggcagctacgacatgatactccttccaccgccgtgcgacaacgacaatggcgaccgacagcctgcccgccggcggcggaatcgacaacgtcttccccgcgtgatggaagaacaacgttcgagctcaccccgtcctctcccctgctgacggaggaggaggcggggcaaccaaggccaagcaggaggcagcgcctcgtcggctgtcgagcgagtcgacgaccccagcgccccaacggggggcgcaccgggcgtcgacctcgcgtttgagacgaaggcgagcgccgtctccccgcgacacgccaatcctgagcaagcggacgacgccagcacgctcgcgaaaagcttgctggacgtcacccttgtacctgagacgacgacgcagtcagtccccgacgtgacctcatcgccgcccgtcgaccaaaaggtaccgaccgattcccatcccacgtctttcggattcagcctcgacccgcctagcggcttcgctttggtgggcgctctcgtagaggcgagtccaaacccactggggtttcgtatgcggtcaccttgggaccggctgacggacgtcttgacctacgggccctctgggtccgaggaagacgacgagcctagcatctgttgggatttctctggacttggcaaccccagtgccatgcgggacttcatgaccgcatgcgactactgcctttccgactgttccgacggtagccgtagcctcgacgacgaggactgcggcccaagtcgcgaatgcttccacgtcgatctggggggtccctccgaaggcaaccatctcggcatgccggaggacggtgatctccctaggccggtgcctcgcgttgacatcccacgggagctagctgtggtccccgttcaggcggggggccatgacccacagctggagcaaatccgcggggtacaggctaggctcgacgagggagcaggagcgcttgagccgatccgtcgggacgtcgggcaggcatgggtgggccaacctccagccggagaaatacgtcatctgccccagggcctccagcaccgcatcgccgacgacgtcaggttcaggccgccacccgcatctagtggggtcggccagaacctggctgcagcagcaatgcttctccgcacgatgccggagccatcaaccaccgaggggcggcgaatccagggagagctcaagaatctcttggaaggcgccgcggtccgacgggccgagagctctgcctcccgaaggcaggggtacccctcggaacctcatgccgcgacttcccgattcatgcgggaagcctcggtctacaccgggcgcacgcgcaacaccgcgcctgcggccccgggtcgcctcggcaacgagcaccatcaccgcgaccgtcgggcccacctcgacgagagggtgcgccgaggctaccaccccaggcgtgggggacgctacgacaacggggaggatcggagtccctcgcccgagccacccggtccgcaggccttcagccgagccatacgacgggcgccgttcccgaccctgttccgaccccccgactactatcacaaagtactcgggggaaacgagaccggaactgtggctcgcggactaccgcctggcctgccaattgggtggaacggacgatgacaacctcatcatccgcaacctccccctgttcctctccgacaccgctcgcgcctggttggagcacttgcctccggggcagatctccaactgggacgacctagtccaagctttcgccggcaatttccagggcacgtatgtgcgcccgggaattcctgggacctccgaagctgccgacagcagccgggagagtctctccgggactatatccggcgattctcgaagcagcgcaccgagctgcccaacatcaccgactcggatgtcatcggcgcgttcctcgctggcaccacctgccgcgacctggtgagcaagctgggtcgcaagacccccaccagggcgagcgagctgatggacatcgccaccaagttcgcctccggccaggaggcggtcgaggctatcttccaaaaggacaagcagccccagggccgccgatcgaaagatactcccgaggcgtcaactcagcgcggcgccaagaagaagggcaagaagaagtcgcaagcgaaacgcgacgccgccgacgcggaccttgtcgccgtcgtcgagtacaagaaccctcggaagccccccggaggtgccaatctcttcgacaagatgctcaaggagccgtgcccctatcaccaggggcccgtcaagcacacccttgaggagtgcgtcatgcttcggcgccacttccatagggccgggccacccgcggagggtggcaaggcccgcgacgacgacaataaggaagatcaccagaaaggagagttccccgaggtccgcgactgcttcatgatctatggtgggcaagcggcgaacgcctcggctcggcaccgcaagcaggagcgccgggaggtctgctcggtgaaggtggcggcgccagtctatctggactggtccgacaagcccatcaccttcgaccgagacgatcaccccgaccatgtgccgagcccggggaaatacccgctcgtcgtcgaccccgtcatcggcgacgtcaggctcaccaaggtcctcatggatggaggcagcagcctcaacatcatctacgccgagaccctcgggctcctgcgtgtcgatctgtcctccgtacgagcaggcgctgcgtccttccatgggatcattcccgggaagcgcgtccagcccctcggacaactcgaccttcccgtctgcttcggaacaccctccaacttccgaagggagaccctgacgttcgaggtggtcgggttccgagtaacctaccacgcggtactgggaagaccatgctacgcaaagttcatggccgtccccaactacacctacctgaagctcaagatgccgggccccaacggggtcatcaccgtcggccccacgtacaaacacgcgttcgaatgcgacgtggagtgcgtggagtacgccgaggccctcgccgagtctgaggccctcatcgccgacctagagagcctctcgaaggaggtgccagacgtgaagcatcatgccggcaactttgagccagcggagacggttaagtccgtcccccttgaccccagcggcgacgcctccaagcagatccggatcggctccgggctcgatcccaaataggaagcagtgctcgtcgactttctccacgcgaacgtcgacatcttcgcgtggagtccctcggacatgcccggcataccgagggatgtcgccgagcactcgctggacatccgagccggagcccgatccgtcaagcagcctctgcgccgattcgacgaggagaagcgcagagccataggcgaggagatccacaagctaatggcggcagggttcatcaaagaggtattccatcccgaatggcttgccaaccctgtgcttgtgagaaagaaaggggggaaatggcggatgtgtgtagactacactggtctcaacaaagcatgtccgaaggttccctaccctctgcctcgcatcgaccaaatcgtggattccactgctgggtgcgaaaccctgtctttcctcgatgcctactcagggtatcatcaaatcaggatgaaagagtccgaccagctcgcgacttctttcatcacacccttcggcatgtactgctatgtcaccatgccgttcggcttgaggaatgcgggcgcgacgtaccagcggtgcatgaaccatgtgttcggcgaacacattggccgcacggtcgaggcctacgtcgatgatattgtagtcaagacgaggaaagcctccgacctcctttccgaccttgaagtgacattccgatgtctcaaggcgaaaggggtcaagctcaatcccgagaagtgtgtcttcggggtgcctcgaggcatgctcttgggcttcatcgtctccgagcggggcatcgaagccaacccggagaagatcgcagccattaccagcatggggcccatcaaggacttgaaaggcgtacagagggtcatgggatgcctcgcggctctgagccgcttcatctcacgcctcggcgaaagaggtctacctctgtaccgcctcttaaggaaggccgagtgcttcacttggacccctgaggccgaggaagccctcgggaacctgaaggcgctcctcacaaaggcgcctatcttggtacccccagctgccggagaagccctcttggtctatgtcgccgcgaccactcaggtggttagcgccgcgattgtggtcgagaggcaagaagaggggcatgcattgcccgttcagaggccagtctacttcgtcaacgaggtactgtccgaaaccaagatccgctacccacaagttcagaagctgctgtacgcggtgatcctaacgcggcggaagctgcgacactacttcgagtctcatccggtaactgtggtgtcatccttccccctgggggagatcatccagtgccaagaggcctcaggtaggattgcaaagtgggcggtggaaatcatgggcgagacaatctcgttcgctcctcggaaggccatcaagtcccaggtcttggcggacttcgtagctgaatgggtcgacacccagctaccgacggctccgatccaaccggagctctggaccatgttcttcgacgggtcgctgatgaagacaggagctggcgcaggcctactcttcatctcgccccttgggaagcacatacgctatgtgctacgcctccatttcccggcatccaacaatgtggctgagtacgaagctctggtcaacgggttgcggatcgccatcgagctaggggtccgacgcctcgacgctcgcggtgactcgcagctcgtcatcgaccaagtcatgaagaactcccactgccgcgacccgaagatggaggcctactgcgatgaggttcggcgcctggaagacaagttctacaggctcgagctcaaccacatcgctcggcgctacaacgagactgcggacgagctggctaaaatagcctcggggcgaacgacggttccctcggacgtcttctcccgggatctgcatcaaccctccgtcaagatcgacgacacgcccgagcccgaggcaccctcggcccagcccgaggcaccctcggctcggcccgaggcatcctcggttcagcccgaggtaccctcggcccccgagggcgagatgctgcacgtcgagggggagcaaggcggggtcacgcctgatcaaaactggcagaccctgtacctgcaatatctccaccgaggagagctacccctcggccgagccgaggctcggcgggtggcgcggcgcgccaagtcgttcgtcttgctgggtgatgagaaggagctctaccaccgcagcccctctggcatcctccagcgatgcatctccatcgccgaaggtcaggaactcctgcgagagatacactcgggggcttgcggccatcacgcagcgcctcgagcccttgtcgggaatgctttccgacaaggcttctactggccgacggcggtggccgacgccactagaattgtccgcacctgcgaagggtgtcagttctacgcaaggcagacccacctgcccgctcaggctctgcagacgatacccatcacctggcctttcgctgtgtggggtctggatctcgtcggccccttgcagaaggcacctgggggctacacgcacctgctggtcaccatcgacaaattctccaagtggatcgaggtccgacccctgaacagcatcaggtccgagcaggcggtggcgtcactagtaagaatgtgatcatcagtgacgattttctagtgacgctggtgacttcagtcacagattgatacatttctatgaccaaattgacatcttcgtcaacaattacaagggacgaagattagacttgaatattaaagacgaaaatgaaaggaacgtcatagatgaaaatgaaaggaacgtcatagattaatttggcttgatcggctgacgtaatgatgaaataaattggtcacagatgagttttagtaaaaaacggcccacgtgtacacaccacttgacggcgtgggatccttggcctacatgggccgcagttttttgggacacagcccccacctggcgacgcggacccggcccagtacgaagcggtagttagttatttggcaaaaaaaggtgcgcccgcggagcttcgaaccagggacctgcgacttgcgttaaattgttgctaccaccagactacgcacttgttcgtgtacataaagaaactatccgtctgttaacaggtgttcccatatgtcgttatgttaacaggttttcccagccgccattctgcgatctgcatggttcgcctgttctgattttttcctgctgcgatctgcgcttctgcgatcggccgtcaggttacggcacacaacgatgccggcgtctgtcgtcgtccgcttgatcggcaactgggtagcgtcgcagcgaacgagcgatcttgtcgcctgatccattgatccaactgtgttggaagaacggcgtcgtctgcaaacagcgaggcagagaagcttcgggcgcggcaaagcagcggcgtcttgcgcatagctacggcaggcgtggatagaacagcggcagggcggggagaaaagacaaggtttgatgtgctgtgtttttgacaataaggttctatgtgcgtttgaattttatttcatatatgcatgtgtttgatgtggttttcaattttgttcagtgtaatcatagttatggagttaatgcgagttttaatttattgtcaaaatagatggatagaagatgggtttatgggaaacaattcacacctgcatatgtgaaaggagttgaagagttcatgaattttgttactgaaagatacccagaagacacagacattcgttgtccgtgcgtgaattgtcttaatcaaaggttgcgacctcagagtgaagtagaaactcatatacacatttatggaatgtcagctacatacacgaggtggattcatcatggggagtcggcagatacagaagttgagggtatagaggaggatgtcgaaggatatgataatgactttgggatacatatggatgtggacgatcatgtttacgatgatgatcatggagtacctgagatgatcggtgaactgtttgcagcggcagaggctgatggagaagaaccaagatttgcaggagttcttggagattcaaagaaggcacttagtctgggttctagccattcaaaattttcttttatggtgaggatgttgtatatgaagtctcgttatcgaatcagcaatacagcattttcagcaatgatgaagctgatgtccgatggataccctaacagtgagttgccaaaatcatataatgaggccatgaaatatcttaaagaattgggccttggatacgaaaacatccatgtgtgcaagaacaattgtgtgttgtttcggaatgttaatgctaaattgaatgagtgcctagtatgcacggagtctagatggaaagatgaaactggttcgaagcgggttccacataaggttttgaggcattttccactgttgccaaggttgaaaagaatttttgcttcaaaacaaacttcagaggaaacacaatggcacaagaaagtgaggaagccagtcgccaatgtgatgagccatccagctgatggggaagcgtggaaggactttgaccgaaagtacccaggttttgcaaatgatctgaggaacctgaggctagccttagctaccgatggattcaatccatttggcaacatgagtacccagtacagtatgtggccagtgcttgtgacaccgcttaatctcccaccatgggaatgcgtgaatccaacaaactgctttatgtctttactcatcccaggtccaagatgtccaggaaaggattttgatttgttccttgagcccctaattgaagaactgctgaagctatggaagggtgtcaagacctatgatgcatgtactggtaggaagttcgaccttcgtgctgctgtactatggtgtatacatgattatccagcgctggccacgttatccgggcgaacaacaaaagggtattatgcatgtatttattgcgacaagaatctgttgtctatggcaataaggaacaagttatgctacattggacatcgtcgttaccttaaaaggacacattcatggcggaatagcttggatttcaatgttaagcgtgaaaacaaagttgtgcctggcaggttcactgtggatgaggtcctacaagagctagagaaggtgaaagatgtcaggccagggaagcaggctgacattactggaaataaaaggaagcgtagtagtgacggtccaaagatttatagccggaaatctgggttgtggcaattgccatattggaaagatttgatgcttccacataatctcgatgtgatgcacatagagaaaaatgtatgtgaaaatattctttgcacactacttagtataccaggcaagtccaaggacacacataatgcaaggctagatttgtatgatatgggcataagacctgaactgcacttgcaataagatggcaactcggcctgcagggctccacctgctccatatgtgttggggaaggatcagaaagtcgagttttgcaagttcctcaaaggtatcaagtttcctgatggatttgcggataacctagcaagatacataagtgaagatggttcaaaggtggttggaaaactgaaaacacattcttgccacatactcctacagagaatcatagccgctggccttagaggactggtgaggaaggatgtatatgaagcaattgcagagctggggaccttcttcagggaactatgtagtagaaatctacggatagatgttgtgcaacggctaaaaggagatattccattgatcctatgcaagcttgagaaaatctttccacctgccttctttgatgtcatggtgcacttgagtgtccatcttcccgatgaggcaatgcttagaggacctgttcagtatggatggatgtacccaatagaaaggcgactaggcactttgaaaatttttgtaaggaacagggctaggccggaaggatcaattgctgaggcatatatggcaagtgataccttaacattttgttctaggtacatgaaggatgttgacactagatttaacaaggatgatgatagtggtacagagatgccattgcctaatgacatgtctgtttttaagcatggtgctactcttgttggagctactaagactgagtacattgatgatgctatcatgaataagttagtttggtatgtgctacataatgctgatgaagtataggaatatttgacgtaagttagtttggtatgtgctacataatttatgttatgtttattaaatttgaaaatatgcttatgaataaagtatgccatgcagtctgtacagggaggagctatcgcagcaaggtgcacgtccaaatgatgttgatcgaatggttcaacaaggatttgcaaagtggtttatgtcccatgtaagtcactaaacttttatgttataggtttactaaagttttgggtatgcatatgtaattgctcagctgagtaattttgttgcaacaggttgagaagaagtgtaatgagaatccagaattggttagcgaaggactgtgggcactgtcatgtggcccagctcggcgagttaagactagtacagcttgcaagattaatggagtgcggtttagcacagtggatcgtgagaagttcatgcagacacaaaatagtggtgtaatgactgaaggtgaacataacggggagaatatagatttttatggtgtccttaaagaggtaattgagttacaatataactcgaattatcaagttcgtcggtcggtggttgtatttcgatgcgattggtacaaccaagtaggaaagactgtgggcattcgagatgacagccatttcaaatccatcaatgtgcagtcattttggtacaagtccgatccttttatcttggcagaccaagcgaaaaagatattttacctgcaagacacaactccacaatgtaaagatttccgagttgtgcagaaatttgaacataggaatatttatgatgtggctgaaaaatatgagggcagtaatgatgtgcatcaggatgattattgttctgatacagagcatatagtgcaagaaggtgatgataatcaggttctgcacaatgttgaaggtggagaagccagtctaattgaaggcaatttagaggaactaataagaaaaaagaaggaagctgctattattcttgaagatagtgaggatgaggaggaagatgatacaatgtttcaatattttaatgatggtggtgacggcaacaatgatgacatgtccatagaagatgaagatgaagatttctagtattgatagttgatttatgaattgttcagttcagattagtacaacatactgaatgtgtgtctgaaattcagttcatgtttagatgatacaatgtattttctgtattttcagaactgaatgtgtgtctgaaatactgaatttggggtgaactgaacttgtggtgaactgaatgtgtattctgtattttctgtattttcagaactgaacatttgaacacttaatatcagagaaaagattgcatggttattactgatactgctaaagagagacataaagtggtaacagactaacagtaatggcaatatggtatagctacctcgggtaacagactaacagtaatggtatggcaatatggcaatatggcaacagactaaagtggtaacagactaacagtaatggtatggcaatatggcaatatggtatagagagacataaagtggtaacagactaaaagattgcatggttattactgaacacttaacatcctgcagaaggcttgatttatatctcattacatgttagcaacatcgactggttgtagttacatattcattaaaatagataaccaacatcagatatacgcagatcaagatagcttggtctctggaagtaaacaatgtatattattaaatattattgtgctttatgaaagaatgttgaggctgctcttgacataaattatgtacctcgacatcagatatacgcagatcaagttggcgatatatgtaaaattccaaagtaaatgagggattttgaatctgcatataatgaacagcgtttaaaagtggaccaaactatgaaaggcaaccatttcttccgcattactgtcaacagtggctttgtatactttagcaaaagcaccagtgccagttgatcctttgatttgatactttctaccaccttgacacaaggaattgtagtggcagtttagaatctgaactttgaactttggactgggcaactttgaactttggactgagcagagtttacaatctgaactgggcagcaatctgaactgggcagcagagtttactcagaacacccagcaatctgaactgggcactttacaatctgaaaatgcagaaatctgaactgggaagtttacaatctgaactgggcattactgtcaacagttgatgcttaactatggactgggcataacaaaaaaatgcagaaatctgaactgggaagtttacaatatgaaaatgctataatttgccactgtgaacagagaacagtttatgcttacatcctggacagagaacagtttatgcttctaatgaacaaacgtgactggtccaatggtaactccttgctactgtgtgctctgttactgggtagaaaaatgcagaaatctgaactgggcgctcggttacatcctggacagagaacagtttatgcttacatataactgctctctgttactaacgaacaaacgtgactagtccaatggtaactccttgctattgtgaacccttgcgtcttgtgttcgagcttgggataggtaggtttttctggttttgtttacatttttcaatcatttttgtatttttcttttatttatttacatgtatagcaccagtttctccaaatcatttcaaccttttttggggtgttgatggaggtgtaccatgatgttttgtgccggtgcaatttttagaattagtttaactattaatgtaagtatttgttattttactaaagaataagtgctaaaaaaccttaggtggctagaaaaatctagaaacttgcatgtacacttcattttggtgtacaatgttgacaaaaaaaatgcaatttattctgacaaagtggtgacatacatcctacaaaaatgcatacagccctcatataaggctaattactaagtgagagatgttcatgcttgtgatggatctatactaccactttctccaaatcattttaaactttaatggcatgtttattgaaccaacctatgatgttgtgtgcagttatgcatttttcagacctagtttactaattactgtaattatttgttgtatttcgtaaagatatttgttacaataccataacctagctagaaaaatctaaaaacttgcatggaccattcattttggtgtacaatgttgacaaaatagtttcaactcattcggacaaagtggtgacacacatcctaagaaaggcatacatctctcatataaggctaattactaagtgagagatgttcatgcttgtgatggatctatactaccagtttctccaaatcattttaaactttaatggcatgtttattgaaccaacctatgatgttgtgtgcagttatgcatttttcagacctagtttactaattactgtaattatttgttgtatttcgtaaagatatttgttacaataccataacctagctagaaaaatctaaaaacttgcatggaccattcattatggtgtacaatgttgacaaaatagtttcaactcattcggacaaagtggtgacacacatcctaagaaaggcatacatctctcatataaggctaattactaagtgagagatgttcatgcttgtgatggatctatactaccactttctccaaaccattttaaactttaatggcatgtttattgaaccaacctatgatgttgtgtgcagttatgcatttttcagacctagtttactaattactgtaattatttgttgtatttcgtaaagatatttgttacaataccataacctagctagaaaaatctaaaaacttgcatggaccattcattttggtgtacaatgttgacaaaatagtttcaactcattcggacaaagtggtgacacacatcctaagaaaggcatacatctctcatataaggctaattactaagtgagagatgttcatgcttgtgatggatctatactaccagtttctccaaatcattttaaactttaatggcatgtttattgaaccaacctatgatgttgtgtgcagttatgcatttttcagacctagtttactaattactgtaattatttgttgtatttcgtaaagatatttgttacaataccataacctagctagaaaaatctaaaaacttgcatggaccattcattttggtgtacaatgttgacaaaatagtttcaactcattcggacaaagtggtgacacacatcctaagaaaggcatacatctctcatataaggctaattactaagtgagagatgttcatgcttgtgatggatctatactaccactttctccaaaaccattttaaactttaatggcatgtttattgaaccaacctatgatgttgtgtgcagttatgcatttttcagacctagtttactaattactgtaattatttgttgtatttcgtaaagatatttgttacaataccataacctagctagaaaaatctaaaaacttgcatggaccattcattttggtgtacaatgttgacaaaatagtttcaactcattcggacaaagtggtgacacacatcctaagaaaggcatacatctctcatataaggctaattactaagtgagagatgctattgcaagtgagagatgtatagtaccactatgtcaaaaatattttaaaatattataacatgatcataaaccaaactaatgtgtccatgaatagataattacaaaaaaacatagagataaataaaaacaaagaattaatataaaatggtaggcaaaacacaaaaaaaaagtctccttgcaggcgcttgaacctaagagctcggtcttaaagttaagaggtcaaaccattgagctatgcatgtgttttcaatatatacccagccctagtatacttaaacgcattagactccgcattgccaaacacattgggcgccaaaaacattttcgtcgtcgtcactaaaacagactccgctctcatcctctatctcccgcactcctcttatttctcccccactcttctttctcccccacttctccaaacctaatcgccgccgccgggacacgacggctgtcgacgacctgccccctcgaccaggtacctcaccgtcgcccccttacctctcatcgcgtcgatgagctgcatcgtcgccgacttcactcgccgcatcccgctctatctcattgccatccgcatttctctcgccccttccacctaacacgccccatccacattgctctcgctaacccctaaaccctaacatcgctggatttgggtcatcgcagacgaccttgatggtgaacaaaaggaggcacagaagtcagaaaggtccaacccctaaaccctaaccatcgctagatttagtttaattattcattcgttgttatcagagatattgtaaattgatttatgtaatcattatgcactgatacagttgtgtttggttccttacattgtattatatgcagtcacatccatgttttagtagagaacttatgtttctagtactggtagacaaggttcaagaaagcgcgattaggcgtgcgattaggcgcggttaagcgctaagcagagggtcaacgcatcgcttacctactaagcgggcaattaagcgctggccctgcttaatcgtgcccattcggcatgtttaagggagaagaggagggagaggaagaggaggaacacctccagggtcaatccagcaggcagcaaatcgacggatcgacgagagagagagaggcggagcggcttcgcggtagaggtgaagatcgcacgagggaggagaggcttcgggagagggagccggagagcgtacggcacggaggaggataggcttcgggagagggaggcggagagcacagggcggcggcgcgaggcgtggaaggaggcagcagagtactaggtcatcacgggagaggggttttgcgttgagcctcctggcaggtgggcctagtgggctgcagactcatgaagagaggaggtgggggttaagggctgctgcagggtggcccaatatcatgtattgttttctctttttaacaaaaatgattaagcacgattaatcacgcttaagcattttcaccaccataccgctcgctcagcgcttagtgctttcttgaatcttgctggtagaaagagatgagaatatcttcacttttttcgttcatcagcttgtgtaaatctacatcgcctaatcaatgtactagctagtactttgaacattgtttaagcctgcataaagatttccacaaccaaacaggggaaacactacagttatagtgcaaccacaattatgaacttgcacaatcataaccaagcttcataatgactgaatctacacatcttatctatttgcttttagtcaaatccttccctgcaaatagtagtacctcttagcttttagtaaaatcctttacattatctaatacacacagtatgcttgttcttatctatcttgcaagtagttcaacatgagcgaactgcttatgagagaagacgggataaacaagtggaggagaatataaagaagatgcaagatttgggtctgaacaaatatacttctgttctaaataattctgtctcaccatctgcatcaacaaaggggaaacatgcagcaaacaagataaataatagttcagattcggattcatatgtctctttctatctccttgacgatgatgatcaaggagatactgatgatgacagtgaatattatgagcagccaaaacccctggcaatgaaggtgctccttctatcttcaaagtagtggatgccaaatagttgcattgcatttcaatgtttttaatctggtgtttaatatatgctcatgcttttagattcatcttctttatttcatacctcttaattaatatatggtcttgcttttaaatgcacatgactattttttgtggacagtatcctagaagaggtagaaacacaacccttgcttcaaagaagaagatagaccccaacatggctccaggcattaggttcagcaagagagtgagggcaggtgcacaaccagaggagcaatcttcaaaaaggcttcactctacagagacagatggccacaatgtacaggaaccaacagatggaaatgatcacataccaaacagccctactacacctggacttgctgatcatttcagcagagctgcagaggaagtcatggcatctgctactcatgacagtacaggtgatgctgaaggcaacagtcgtactgcacctggacttgctgatcatttcagcagagctgaagaggaagacatggcatctgctgctcatgacagtacaggtgatgctcaagccaatgtagctagagatgaagaaactgaaggcaagttctattttttcagtcaaataaggcatctcttttgctgatttgcatgaaacaaaacaatttcattattcaataaaagtgaattatattttgtagctcctacatagcgagcaccaaggagacccagggcagcaaccaagggaaaacaactggacatgatgactaaagttatgcaaaggagactgcccatagctgttgaggaaggcaaaaaaaggccacatgaacctgttcaagctgccaagtttgcatcagaggctggcatcattattcgggaaaccatgcctatcctaactcgttggaaagattacaaggacgaccagaaatactacaacagctttgtgtcacagctaaatgtaagtgcattactgattctatggttcacttgtatactgcttaacctgaattgactaactatggaattgtcatatgcataggggcgcttgtccgttaacactgaggacaaggcaacaaaggaagcttgcaccgatatgctacgctctgcggtaaaaaaccagcgttatcggctcaagcagaaatacttcaatggtgtacctgcaaatgagattagcacaacttctcctgtatcttacatgactgatgaacagtggagggcattagttgcaaagtggtctgatccaaagaacatggtatgggtatcttgtcatatattgttctttcactatacgtttgcaaaggatcttcgcatattgaacctatgatctaatctgacatgttcattctcttgtagcaaataagtgaaaagaacaagcagaaccgcagtcaagtcaagtttcatcaggctacgggttctcgctgctatgtggcacacttacatgcatatgtaagtaactattaccttatactactacctgcacttttgcactcaacttctattgcatttgatctgagcaaacttcgctgtgattgtttatccacgaaacagaagcagaagagaaaccgagaagaacccagcttagatcagactgaagaactagatgcggtggacgccttcaagacctgtcataccagctccaaacgtggcctgagtgaaccggcaagagaagcacttgtaagttcatttgtttgctttatttagtgtaattgttatgagatcatatgagggaggttggctgtgggtcgatggaacgaaggggagtgagatcgatgagtgagatcgcctgtcccatcccaggggagttcagatcatagtctattttgtctgccatttgtctgccatcaaatttctgaaatgaaagtaaatatcatagtctattttttgtaggacccgtgcactagaaatgtataggttttagagtctttgttaagcaaatctgctataatttgtaactgttttcacattatttttcatagtctatttatagagtctttcaaatgtatagcttttaatttgccatcaaatgtatagcttttaagcaaatctgctataatttgtaactgctataatctgctataatttgccatcaaatgtatagcttttagagtctgtcagtctatttttcatagtctttgttaatgccttgtaggctataatttgtaactgctataatctgctataatgtgcactagaaatgaaagtcactgttttcacattattgtcagcatcttgctgttgctcattagcattaacatgttactgtttctgtccatgatatttcagtctcatatggaggctttgagggctgaacctattgctgaaggtgagatgccagcatccagtgtgcaccttgtgtcgaaggtgttgtcccagagcagctcacaccaattcctgaaaagcgtcggcatcaaaacatcggcaacctccaaggcatcatcatcaaatcatagtgagcttcgggaacaacttgcagctgaagcgacgactgtcgttcaaggtgaactcgaccagctcaggaagaaatgtgaagaagctgaggaacagcaggcgaggacacaaagggagttggaggagtacaagaagataacagagaagaacaacaaggagatggaggagaccaatgtgctcatcaagaagctcttgtccttgcatggtaactcttcttcgacatgagggctgctagtcagagctgctgtttttggcctgttctttgacatgagggtacccaaaaactctagttgctcgtgggtgtcaacttttgattatatgctgttatgtttgtgcaaactcaactgaaatgtgaagtcaagtggtgatgctgtgaactgagtttagtgttgtccacttagtttgtatgcgcactggaatactagttgtattcatctatggaatatggaattgtgtgctcattcctctgttctagtatattttgcaatttccaattaaattattctctgcacatctgtgaccaaactggtggcatataataaaacatatgccacgtcagctgccactgtactagccacgtcagcgttgacgtcagctgccacgtcactagccacgtcagcactgacgtcatacgcatcagcaccttccaaatggctgttaatgaccaaacaacggctctatctgtgacgataccgtaccatcacagaaaccaaccgtcgcagacgacgaattatgacggaaaagtgccttcctctatgaccacaactgatcgtcatagaatgaattcacttccatgacaacgcggctttcgtcacagaatgtatacacatcgatgacgaaactgggtagtccatcacaacacaacaaatgtgacacgacccctatgaccaaatcgaactcgtcacaaattcgtcacaaacctttatctgtgacgatatatacacatgcagtgatgcaatacgaacgtcatcgatgataagatctctactagtgcgttcttcaccaacatcatccatcgcttcggggtcccgaactccatcatcaccgacaacggcacctagttcaccgacagaaagttcctggacttctgcgaggatcaccacatccgggtggactgggccgccgtggctcatcccatgacgaatgggcaggtagagcgtgccaacggcatgattctacaagggcttaagccttggatctacaacgacctcaacaagttcggcaagcggtggatgaaggaactcccctcggtggtctggagtctgaggacgacgccgagccgagccacgggcttcacgccgttctttctagtctatggggccgaagccatcttgcccacagacttagaatacggttccccgaggacgagggcctacaccgaccaaagcaaccaagctagccgagaagactcgctggaccagctggaggaggctcgggacaaggccttactacactcggcgcggtaccagcagtccctgcgacgctaccacgcccgaggggtccggtctcgagacctccaggtgggcgacctggtgcttcggctgcgacaagacgcccgagggcggcacaagctcacgcccccctgggaggggccgttcgtcatcgccaaaattctgaagcctggaacgtacaagctggccaacagtcaaggcgaggtctacagcaacgcttggaacatccaacatctacgtcgcttctacccttaagatgttttcaagttgttcatatacctcgcacccacgcaaagtttagtcgtcaaggaagggtcggcctcgccccggcaaagcccgaccctccctcgggggctaaaaggggggggaaccccctctgcgtcgaaattttcctcgaaaaaatatcttttctgccagaatgtctttcgtgctttttggctacttcgaaagcggaccctgaaaacgacggagtacacgtaagcagccaaggctgaccgagccgagggactcctacgcctccgggatacggatacctcactcatcaccttctgcgataagtaactcgcgttcggataagtgattccgcggaccgaacaagtcttctcgtttggaagctcttctgccggagcgattcttcgagccttcccgactgcgtcggtaacagaaccccaaggacgggtaagagtgcgcgtaagcggcaaggctgaccgagccgagggactcctacgcctctgggatacggatacctcactcatcaccttccgcgagaagcaactctcgctcgcacaaacatttctgttaccaacaaaaagtccagatactcgaagcaagaggaaaagagacgcagctttacaacacgacgagggtgtgttttggcctcggcggccgcaggaaacacacgctacaagacaatccgatcctgcaggctcgggtcttaacgctggaagggagcagcagcaccctcggcatcgacaacgccttcggcgaggtccgacttagcctcggacggcgacgcggtccgaggatctccactctgaaggatgacgtcatcgccacgcccgggccatcgctgccagggtcttctcgggaatccggcccgagcaggcggctcggccggtcaccccggggcctcggccagctgtcctccaaggacgtcagcccgaccgaggcctcggctggtcaatttcggcgtcggtcccgctaacggacgacccggccaggctccggccaaccaggttttcttttcgagccaactctgcctctgttcatgttgacaccgctacccctggcctcggctcatcggagagcggccgaggggttcctttaaccaagctagagaagcctcgggcaacaaggccgaccgagccgagggactcctacgcctccgggatacggatacctcactcgtcacctttacacggggcgactcacgcttggtgaagcggtttagacaaccaacaggtgagtcttagtgctcaaaaatgaggaaaaaacacggctccgtgccgaaaaatacatacatgttcaggccccgacagccacaatgaacaaaaacactggcattcaaagtgccattacaaacggaactccgattccacctccgcaggtacgaaaaaccccactcgacgggggggggcctgcggagcaacggaagaccgacgaacggcgcgacgtcgcccgctccggcagcggcgacgacgacgacttctgctccggggggccgaacagcggcagcgatgacctcagggcggatgccgctgccaggaggcccccgcccgtgcccaaactcgtgaggcaaggacgggcagaaggccgtagagttggaggtcggctcgtgggcggccctggctatctcgtcggcggaagaacctcttccagctaccgtggcggaagccggcgccgagagcggctccgaagccactcgggtccgagagccaggcacgctgcagctaccggcgccacggacgacaaccgtccttccccccgatcactgagggaaggagcgggccatcgcccacgtgggggctgaccccaactcggcacactcccctccccagccctggtgatgaaaatccttgaggctgagggaggggcagaggccgcagcccggctcgctttcctccaccatcaaactggaggtcaccgtcttgggtgaccgccggcggggggtgcagccgggctgcatgatgaaaatccttgaagccgaacgatggcagaaaggtaccaactcccacggagttgcgttcctccaacgatgaggcggaaagacggtggatatcccccatccgggggcttggaaggtggaaagacacgatgcataagggagcgcgaagacgtggtcgccttctaagggggtcaccctccttttaaaggcgactctccctgcttgcgtccccagccgtcgcgggctgagtcttctccaacacgctccaaggtcctccccctatggcgcgggggctgggtcccacacgtcatgcaagccgactcagagcagaagaagccaaaccgccgtgcgcggtgcgtacaaccacccagtggttacaagcgactctccgcttttgcccagacccacgggcgaaaggggcgggcagccatgcaggcggcatgcaaccgcgccaagtgggcgcacttctccgactcccaacacgcccagcatggaggcccaggcccacgcgtcatgcaaccggcgcgccgaatgcttcgtgcatgcaacagcaccgccacttgcgccactaccgcgcctcctcgactgcggaaccaataccgcgactcgaggcgacccagcgcacgacccagcagcgccagcctggcgcggcggtcaatgcggccaaaaatgggccggcagtaatggcgatggcaggcgggcaggagcagcggccacgtcgtcagccaagctcacatcccgtccgggggcagcgagagaacccactctcacggcgtgaagacaatgcgcccgtgatccattcctcgaacggctcgcgcacgtgcaacggccgccccgccaaccactcgccccgtcgcattaactccgcggcgggacaggcggcgcctctggcaggagaagcgggcgacgcttcgccttcgccataatgaccgcgtcaaaaaaggtacgccgcgtcgttcgatttcatatccttttccttttttcctctttctctctcttgcaacagggaccgagaaagggggataccccgaaaaggatccttccccgtgaaggaaccaggctccgagcctccctactgatcagaggttcgaaggctggcccctcggaagggttcgacagccgcctcagatcgcgtgggctctacacccactactggtcagaggttcgaaggccggcccctcggaagggttcaacggccgcctcaggctactcgggctccgcgcccactactgatcaggggttcgaaggctggcccccgaagggttcacagccgcctcagacgccgagcgagggatgaccatgggtacgttcgatacataaccaaggctcgggctgcgctcccgaggtaccctaggacatttccgagaccagcgggaacggtcttgtaacggaatcccatcagagggaggcatcgagccctcggaccccgtcgccaggggaccgggtccggcagatcacccgcaggtacttttgggcgtgcctctgggcccctagccgacccctaacgaacggggcacggacgtccactcggattacccgcttgcagctcaccagagacaccatgttcggcgcccatcgagggcaacatggcgctttcccccctcctccttgcggaaaggcgacgcaggggcgtatgtaaaaaagccgagtgtgtccctgatcgccctctcgccctgtgcagaggctcgggggctgctctcgcaaacccggctccggtcgaaccgttgacagcatcaacataccagcccgagaacttgggaaccgaccgtacacccgggctatagccagctcgcatgagggaacaaccagaccagccgaagcattacgcgaggcattaagacctcggaggagtgaaaccactcctccgaggcctcgggggctacacccggcgggtgcgctcgcgcgcacccaccggtacaaaacgcaaccgagaaaggctggtccccttgcaaaaaagtgcgacaaaagcctccaagcgagtgctaacactccctttgaggctcgggggctactgtcggggaccataattaggggtaccctcaaggctcctaattctcagctagtaacccccatcagcataaaactgcaaaggcctgatgggtgcgattaagtcaggaatcggtccatacgagggactcgatcacgcctcgcccgagcctggcctcggacaagggcagccgacctcggaggatctccgtctcacccgaggcccccctccagcggcgaacgtgttcccagctcgcccgaggccctgtctttgccaagaagcaaccctgaccaaatcgccgcgccgaccgaccaagccgcaggagcatttaatgcaaaggtggcctgacacctttatcctgacgcacgcctcccagccgacagagccgaagtgactgccgtcacttcgccgctccactgaccggcctgacaggaagacagcgccgcctgcgccgctccgactgcggtgccactcgacagagtgaggctgacaggcagtcaggcccggtcaaaggcaccataggaaactccgctccgcccgacccagggctcggactcgggctaagtcccggaagacggcgaactccgctccgcccgacccagggctcggactcgggctaagtcccagaagacggcgaactccgcccgacccagggctcggactcgggctaaagtcccggaagacggtgaactccgctccgcccgacccagggctcggactcgggctaaagtcccggaagacggtgaactccgctccgcccgacccagggctcggactcgggctcagccccagaagacgacgaactccgcgccgcccgacccagggctcggacttgggctcagccccagaagacgacgaactccgctccgcccgacccagggctcggactcgggctaaagtcccggaagacgacgaactccgctccgcccgacccagggctcggactcgggctaaagtcccggaagacagcgaactccgctccgcccgacccagggctcggactcaggctcagccccagaagacgacgaactccgcgccgcccgacccagggcttggactttggctcagtcctagaagacgacgaactccgctccacccgaccccagggctcggactacgccccgacctcagccgacggtctccgcctcgcccgacccaggggctcggactcgacctcggccacggaagacagactcgacctcggcttcggaggagcttccacatcgcccaacctagggcgcagaccagccacgtcaacaggaggcgccatcatcaccctgccccgagctgactcgggccacagggaacaagaccggtgtcccatctggctcgctccgccagataggcaatgatggcgccccgcatactctgtgacgacggcggctctcagcccccttacggaagcaagaggacgtcagcaaggactcaaccgctccgccagctgtccctccgtcaggctccagcactcctccgacggccacgacatcacatcagcagggtgccaaaatctctccggctgccacgacagcatgtacttagggcgctagctctcctccgctagacacgtagcactctgctataccccccgttgtacacctgggtcctctccttacgcctataaaaggaaggaccagggccctcttagagagggttggccacgcggggacgaggacgagacacgcgctcgcttgaagccgctcgctccctctcccgcgtggatgcttgtaaccccctactgcaagcgcacccgacctgggcgcgggacgaacacgaaggccgcgggattcccacctctctcacgccgatctctggccgcctcgctctccccccttcgcgctcgccctcgcgctcgacccatctgggctagggcacgcggcgacgttcactcgtcggctcagggaccccccggtcttggaacgccgacaatactgatactaattatgttacatggtgtacgtatttatgcaattcggtacactatgtaaaaattttttcctgctctatgcacacaaatttaggatgacaggaatgtgatgaaaggaaattgtcacacccggttctgggggcaaaaccgaatgcatagcgtatgtgtgccaagatccatttctacacatatgttgacgtcacaagtgtaatatatcaaaagacaatacaataaaggcgtaaagagagtagagtactgtctttccagcacattgggatcctaagcttagaattccacgtggacac

SEQ ID NO: 3 - DNA, 120745 bp, Zea mays
ggattcccgacgttggaagatggactttcggtgctatcgaaagatgaactggcggacagcttagcatataatagcctaaaggtaaaaaaaattgttatattaaaaaattgagatttattttatttgcttatacttaatttcatacttctttcgcagggcctcattcttagcaacgccctttgggcacaaaaaagtgccgaagatgaagggtgtagtatagccttgaacaaccttcgttccgaagtaattgaactaaggaacgaaggtcttaaaaaagataagattttaaactcattgttaaacagaataaaagaagacgaagctactgccaaagcccaagctgaagcccagagaagcgaaattgaggatctctggaaacaactggcagaggcaaaattaaaatgtgcaattgccgaagctgaccgggacgccagtaactattggaaaaattattgggagaagacagttgtagaactttggtcttcaaaagagaaatgctacgaaaaatccatagaatgtgtgcaaaaaataaaatccagcttcgctaatgttggcgcattctctagcgaggacaacttcgtaaggggcgatcctgaaggcctaattgattggatcagcaacgaagccgaagcctttgaagaaattttgagtggtctcggggatgtctgcgccttctcaggtgccaggggaatcatggctattttggagaaatcaggctgtgatcacgtgaaagctttggctcaaaccgaagctaccttatctattgaagatacaaaggacccctcggccgaagcaagcttagttggcgggaaattctttactgacatctgggagaatggcgaccgagagatggtgcacgagataataaaaaagagtgaaaaagattctcatgatgcaaaaaagcgatgaaagcagttgagaaagccgcggatcttgaaaggtggataggtattgcttaataacttttaactttatattttatttttgtgacttcagacttatttatgttttctatcgtagctgagctatctccttccctagagcccttcgggccaacggtcgacccagaagcaaagaaagaggaagaaatcactaaaatggccgaagctattttggatgaagccatctctcgactattaaacgaagctgcggaagcagttttaaaagaagaatagttgttattgtaaaaacatttggaatgtaatatttgctgaacaaagtgtgtaatatttttataatttgaatgtaatatataagctgctcgtaactcaattctttacgatgcatgaaactttacgtacataccgtttttgagccttcggcgaaaaaacaccttcccttcttttcatgcttcgtgaagaatatccatacttcgtaaaaacattatgcttcataagcaatagatctctttttcatattagagttgatgaagttgtacttgttcaaaacttattgtgccttggcactgcttcttcgaaacaatctcgaagatcaacattgtatccccttcttgtgttattgatgcaatatgatgttatgctatgcaaaatgatgtgatgatgttatgctatgcaaaatgatatttatgtcgaagatacataaacattcccacagtagagcacacaatctttttgccgtttatttttcggcttcaccgcttatttttcggtgtatcagcgctgacttttcgctgtaagcctcccttaggtgcttcttcgccttttacttcggcggtatttgcgttgactttttgcgcttcgccttatacttcggtggaatcagcgtttatttctcgctgtaagctctgcattccctttggaacgacttttgagcagaaaacttacgctgcgctcccttagaaatgactttttgtaacttcggcaaacttacgctgcgtttcatagaacgacttttttgtagtttcggagatactttctgtagccacaagttcttaagaacgagttttcatgcttcatcaactttttgaattccgtaagtctgtggagaagatatattttcactatgacaaaaacaaagctgttacaagaaattgaaaacaacaagaaaaacttaggctttcaatgattgttctttattaaaaagaaaaatgataactaatgcaagaactatttcagaagtaggatatctgttagtagatgtgctttgactctggcacaatactgttgactgtgcgagcttcggactcctctctgaagtctcgttgctgatgagtgtgctggctcccttctggctgctggcctcgttgtattggtggtggaggtggaagctgttgccaagatgcctgaggttggcttgccgaagcaacagaagctgcaggatggttacccttacccacatactctggaatgtacggtgagtggtacgaagcagtatgcataacttgcttcggctggctctgttgggctgcagtttctgctatctctttctgtttctggatggtgacatggcacatcctggtagtatggcccttgtcctcaccgcagaatagacaataaattttcctgggctgatccccaaaccttcctccgaagcccctggctcctctgccccttggggctggaggccgaggataactctgttgctgccccgaagcctaggaggaatattgcggcctctgttgctgacttcccctgtcgtcattctgagtggaatgaattgatctgacatgtctagggtgtactctccctccgaagcccctggtcatctcggagaatctgtaagaaggcccccaacacctctctttcccattcgtttaggtgagaaaacacattggggagcactagggagttctttcctagtgaggcgtctgtgatttgataatcacaagattaaggatttcattagtgcatgtgtagtagcaagtgtgcatccaccttcctcattaagcttgtttaggataagccagagtttgtgccggttactcttgatgttcaacaacaccaagatggcttggtggtaattaagagcttggtgatctctcagtggtgctcgtgagagtcccaactcattgtgtaataaaagattataggtgattcaccatgccggagtggtgaataatcaacccgtagagagcattgagtccttgaatggatcgatggggggctacacccttgtgtgggtcaagtcagagttttagcagttcttgcacccatgatctcatcgtgaagcatagataaatttaaattcttttgaattatttatatatgacaacactattcgtcgctctaggtgactatcacctaccctaaaatgacttaacaaatctttattaattgttaagtcattcacatttttgttaatccactccaaagtcagggtgtttagtgtttttacatccatgtctccttagactcacggtgtctctcccagattctctctcaccctcacctctctctcactagccactagggaacgcaacacccatcgatggctcttcgccccatgaaacgttcacacaatcgcaattgtcgaggcatgcatggctgggagagcagacatggaggcatacgtgctagggttgcacatgggcaagagggtgggtgtggctattcagatatgcatggtgagcaagatgggtgaggttgtgggcatgatgaggggataaggaagaataagatctcttttgttaggctgtctccagcagctatcgtatcccattccctatcgcatcccctattttaaactttactatgcaaacaatgtaatatatagtgcagattccctattttacacaatgtgttgtagacaaccttggagctcttgcataaaagctctagttttggctctagctcctctgagaaaacaatccccaccatgtttttaggaagaatccctgaagggcaccccatttggttggaaatacatctcctcctacaggattatgtttgacttttttttgcaatgtgggacccacaggggagaggaggacgagaaggaaccggagagcctattttttgggctcctggcttcgcttggtttctaggggcggctccttcctattttcacaaaggagctagtagaggagcctcccatttcatgattttttgaaggatctatttaaggagccttgaaagagccctaccaaggtaggcctagaaataataaaggaggaaaaagagaaggtatcacaacttttgtctacaacgtgaaaatgtttggctaaatagataaaacagtttgaattttatcgattcaattgtttattgagggcatgtttgggagggctttagttctagcttctttcgcgaaaaatccagagccctacaaaatgacgtttggtaaaacgacttcttccgaaaaacacccaaaaacccaagatattttatactacgaaggaaaggtcacacatcctagttagcttcactggttctagctccttccaattttgcaaaaaagtcacaaaggataagccattttttcaaatgatttgtgaaatgcctacgctaaaaagtctacttttccaaaaaaactagagctagagccgtttttggcaagtcagaaccctaccaaatagtccctcagtttaagcaaagtgaggctatactgaagctaaattatgccaaattgggcctacatctccatattttcaaccaaatgctttagggtttcttgtaatcgacatgatttgtttcttcataaatagtatatggaccgctccaaaatactccatccgtttcaatttatattacgtttgatctttttaccctaaatttgatcgactcgtcttattaaaaaagttcataactattaataatctttactgtgatatcatttagcatataatatactttaagtgtagctttgattttttttttgcaaaaattaaatgaaacgacccaatcaaacttgataaaaaagtaaaactaattataaatttggacataaggagtaggagggtgtttgaatacactagagttaatagttagttgtcttaaaatttgctagtacaattagctagctaacaaatatttaggtaactattagctaatttgctaaaaacagctaatagttgaactattagttgaactattagctagactgtttggatgtattcaactaattttagcagctaactattagttatagtataatattcaaacacctcctaattaaaatggacaaatatctattcccttggtcccttgcgttagattttccatatatcctcatttagtataaaaagaatcatcaaaaagtggacaacccctagtggaacaccattttagtagtggttgcatgaaacctttcgcgcatcagttactatgtgtcactctaaaaatggggcagcatgtacgcagtgcctatatttatacaaggcatctatcgttgcctcctcagttcatcactaatcacacttattgtgccctcgacgagtatctagctagctcattaatcgatcaatcggggtgtgcggtcgaaggcggcaatggcgagctactcgtcgcggcgtccatgcaatacctgtagcacgaaggcgatggccgggagcgtggtcggcgagcccgtcgtgctggggcagagggtgacggtgctgacggtggacggcggcggcgtccggggtctcatcccgggaaccatcctcgccttcctggaggccaggctgcaggagctggacggaccggaggcgaggctggcggactacttcgactacatcgccggaaccagcaccggcggtctcatcaccgccatgctcaccgcgcccggcaaggacaagcggcctctctacgctgccaaggacatcaactacttttacatggagaactgcccgcgcatcttccctcagaagtgagtccgatgctgccgccattgttctcgcatccatccagcatcgtacgtcctctatacatctgcggatgatcatttgcgcatgtttgtggcatgcatgtgagcaggagcaggcttgcggccgccatgtccgcgctgaggaagccaaagtacaacggcaagtgcatgcgcagcctgattaggagcatcctcggcgagacgagggtaagcgagacgctgaccaacgtcatcatccctgccttcgacatcaggctgctgcagcctatcatcttctctacctacgacgtacgtacgtcgtcacgaatgattcatctgtacgtcgtcgcatgcgaatggctgcctacgccgtgcgctaacatactcagctctttccgatctgctgcgccaatttgcaggccaagagcacgcctctgaagaacgcgctgctctcggacgtgtgcattggcacgtccgccgcgccgacctacctcccggcgcactacttccagactgaagacgccaacggcaaggagcgcgaatacaacctcatcgacggcggtgtggcggccaacaacccggtaactgactagctaactgcaaaacgaacgcacagactccatgtccatggcggcccacaaggtcgatgctaattgttgcttatgtatgtcgcccgattgcacatgcgtagacgatggttgcgatgacgcagatcaccaaaaagatgcttgccagcaaggacaaggccgaggagctgtacccagtgaacccgtcgaactgccgcaggttcctggtgctgtccatcgggacggggtcgacgtccgagcagggcctctacacggcgcggcagtgctcccggtggggcatctgccggtggctccgcaacaacggcatggcccccatcatcgacatcttcatggcggccagctcggacctggtggacatccacgtcgccgcgatgttccagtcgctccacagcgacggcgactacctacgcatccaggacaactcgctccgtggcgccgcggcaaccgtggacgcggcgacgccggagaacatgcggacgctcgtcgggatcggggagcggatgctggcacagcgggtgtccagggtcaacgtggagacagggagcgaggtacgaaccggtgaccggagaaggaagcaatgccgatgccctcggtgggctcgctaggcagctctccgaggagaggagaacaaggctcgcgcgccgcgtctctgccatcaaccccagaagctctagatgtgcgccctacgatatctaagacaagtggctttactgtcaatcacatgcttgtaaataagtagactttattttaataaaatataaatatatatatattctgataaccaagattcgaaccctcacttatacacaattttatcttattttttataaaatgagaatggaaaggactaccgtgaacgactatagaaccaatcatactagtttaaaatgctcgtaagctatgacgaacctagtaggccggtgctggaccattccaaaaaacctataaaaataaatttaatattaaattaaacatatggtctatatatcagatattaaactcaaaagaataattattataatttatcttagctaaaaggttgagaaaggtatgcgttaaaaaagagttttaacccatttttatagcttatttgatcgcccgtccacttttagggagcgaggtggtactatgcagaagtgttgcgctgtgtgcgacttactatcatgttgggtttaggtggattctcacgacccaatgatagacgagaagtgtgggagatgaacaaacctacgcatttcgcgtacgacacatgtgtttgaacaacgagttagattggaaaaaatataatgaccttttttgcaaaaatgactacaatgaaaaccaggaaaaccggtgcttcataggagtagagatttgacggtaaattgttacgatctactggtatttgctgcgaggatgtattcgcttggtgaaaacagaattacagagtagcagtagcagggaagacagtagcgagaggagaagaagaaacttgaggaagaagaagataaatgtagttgttacatcctgccttcgccgtaggtctcagcgagcatatatcttcaggtcctccattctgggccctggaatctcacattggccttacgctggcgtgttcctcttctcggcccaactgtagtcttctcttgaggcccaccagtctccacattcctttgttgctgctatagctcctcggacacggctgcttccgcctgctgctgcacctggatgtcttctgaagtcgacttgcgtggagggacagtgctgccattcccctcccgataacacgctgcttgtccccaagcaggcgctcgagggaacctctgacgaagtggaatcaggtcctcccaagttgccagagatggatgcaactcagaccacagaatcaaccgttgtgatgctccattaggcccccatcggcattgtagtactcgttcaggaatttggtggttgtcaaggcgatcaggaagctgtgccaccaccactaaagaacccactgccttcttgagttgtgaaacatggaacacgggatggatagtagaagtaactggaagctccagcctgtaagcaacagatcccaacttagcagcaactggaaatggcccaaaaagcgaaaatctagcttctgatttgcccgaggtgcaagcgatgactgcacataaggctgcataacagccttctcttgcagccactctccgaggataggcacaggagtggaatccaaaatgtcaatgccaaaatgcttgggtgcataaccatatagcacctcaaatggagacattttcaatgctgaatgccaactagaattgtaccaaaattctgccaagtacaaccagtcaatccatttgtgaggacaagcatgcacaaaacatctcaaaaaggtctcaaggcactgattaactctctttgtttgtccatcggattgagggtgataggaagaactcatattcagtgatacaccagccagggtaaacaatgatttccagagctgactagtaaagattttatcgcgatcagagaccatagcagatggcataccatgcaggcgataaatgtgttgcataaaggccttggccaccactgcagctgtgaaggggtgtttaaggggaatgaaatgtccaaacttggagaatttgtcaaccacgacaagaatacaatttttacctccggacacaagcaagccttcaacaaaatccatagtgatcgtttgccaagctcctgaaggcacatgaagaggttggagtaggcctgggtatttcactctctcaggtttagcttgctgacaagtggcacatgctgcaatgaactggatgacagatttcttcatgttcggccaggcaaacaactgcttcagccgatggtaagcgactgctatacccgagtgacccccaacagcagaactatggagagcagacaatatagactgttgaagtgtatgattgttaccaacccaaatacggcctttaaacttaagcaacccttcttgaagagtaaaatgaggaacaacatcttggtcaacaaccaacttagataacaaggtcttagccgaagggtccaacaaatatccatccattaccaaacgagtccactatggtgaacagactgagagagcatgtaatgtgatagcatgttgtcttctcgacaaggcgtcagcaactctattttcatgtccatgcttgtatacaatcttatattgcaaccccaaaagtttagtaaagacttttgctgccatggagtgttaagccattgctcattcaaatgcaccaaactcttttggtcagtataaataacaaactccccatgaagtaagtaagctcgccattgttccaccgcgaccaatatggctaagtactccttctcataggttgataagccttgagtcttaacaccaagaggtttgctgagaacgctaatggatgaccattctgcaaaagtacagctcccaccccattcttgcaagcatcggtctcaatagcaaaaggttggtgaaagttggataatgctaacaccggggctgagatcacagcttgcttcaaggtattgaaggagatttcttgatcttgagtccaaacatagaacacccctttctttcacagtgcatttagaggtttggcaataatagcaaaatgactgacaaatcgcctataataacccgccaaaccaaggaagctccttaactctttaacattggagggcacaggccagttcaacacagcatcaacctttgcaggatcagtatccactccagcagcactgatcacatgacccaagtaagcaatagatgtttgagcaaatttacacttagacttcttgacaaaccagtggtctttttggagaatggtgagaacttgggccaagtgagatacgtgatcgtcaaatgacctgctgtagactaagatgctatcaaagaagactacaacacacttcctcaacaaaagggccaaagaagagttcatagcgccctgaaaggtaccaggtgctcccgacaatccaaaaggcatgactcaaaactcaaattgaccatgatgtgtctagaacgctgttttaaactcttccctaggcttcaacctcacccgatgataccctgaagccaagtccaatgtggtgaaccaacatgcaccatgcaactcatccattaactgttcaaagatggggatggaaaacgggctttgaccgttaaagcattcaaatagcgataatccacacaaaactgaaaagtgccatccttctttctcaccaacagcacaggagaattaaaagatgatgcactgggtctgataatccccgactgaaccatttctgccacctgacgttcaatttcatctttcggagctggtgggtatcgatagggtctgatattaactgggctggcaccagcaaccaatggtatactatgatcacaacttctttctagaggtaaggacataggtttagcaaaaaccgactgaaactggttcaacagctgaacaatttcaggaggaagggtagcctcatcagtcagagcaacagacacttgagatagggaaatctgaaccaacaattcgtcaaccggctctacagtttccccttgcaagagcacttgcacaccatgataagggatcaacatccatcgttgtttccaatgcacttccataggactgaaagtctctaaccaatcaagtcccaatatcacatcaaaggattgtaatggcaacaccttcagatcaaaggaaaacccatacccctaaattgtccattgagcttgagtaaacacttgggagcaagtcataacaccttcattagccactttaacctggagacaagttggtaccaaagtaatgtcggttaacctggaaatcatagtgtgactgataaaagagtgtgaactgcttgaatccacaagaataacgatttcatactcctgtatagaccctctcaacaaaatggatcctttggcccttgatcttgaaacagcctcagcagatagagccaagaagagttgttcctcgtggactgaatcttctgatggagaagactcattcagaaatgcaggcataagatcccagacttcctgcagggcatgaagttgaactgtagtattgcagacatgtcccctatgccatttttcagcacaacggtcacaaagaccacgtgcatgacgataagcacggagtgcagccagtttttcatcagtgcttcgatcagtctgcatgagacgctgcttaggtaaggatctcggcgcactggcacttgctgcagcagtagttggttgaggaagaggcagggtcgtcttgtgctgggatttcgaccaaataccacgatcacccttgcagaattcactccgcataggtggagcagcgacctcatcctgcaaaaaagcgagggaacaggcaatatccagatccatcgacctttgaagcataacaacagcacgcatatcatcgcaaagaccatccacaaaccgtgtaacaaaatataacggatcaaccccagactcatacacagagagttgatctacgagagaagaaaattgttcaatatattgagttaaactacctaactatttgatgcgaaataagtggtgcaacaacagctgatactggtccttaccaaaccgttcgttcatcaattgacacaagagaggccaagacaaacggggatgacgaaacataactgacagaaaccagcacgctactgtaggcgacaagtgcatagaggcaattttgacccatgaattcagatcaacttgatatatatcaaagtaattcttgcactgggaaatccacaaccgtgggtgcaaaccctcaaaaactggaaagggcaacttagacagatgacccagcccatgacccgacatgtcacccgatcgtgcacgagatgcagccatatcaaacatagatccatgaatacgaggtaggggatgaggatgtggcatagtacgcgtacccttgaccaggtcaggaatataggtcatgacaaacccgaatccctgattctggaggtaatgtttgtcgcggtgcccaatagggccgtcggtgtagaagcccgcaagtgtgcgcggtgctcctggctccgggtggggaaggagtcccgaatccattgccgccgactcgataatcgaaagatccatttgtttgttcagccgccaaaggtcgagcttgatgtcatccactgccgcatccacggcaggccgccaggacaccagatccgcctgggattgctccaattttgccacatgatcctctttgttgtggacgagatcgccaaattgtttctcccatttggagtccagcgccacaaaacgcttgtccatctcctccaacacgaatttcatggatggatccataaattcgtgacggtgctgagagcgaatgcccaaaaccgtagtctctgataccaaatgttacgatctactgatatttgctgcgaggatgtattcgcttggtgaaaacataattacagagtaacagtagcagggaagacaatagcgagaggataagaagaaacttgaggaagaagaagataaacgtagttctgttacatcttggcttcgtcgtaggtctcagcgagcatatatcttcaggtcctccattctgggccctagaatctcacattggccttacgctggcgtgttccccttctcggcccaactgtagtcttctcttgaggcccaccagtctccacattgctctgttgctgttgtagctcctcggacacggctgcttctgcctgctgctgcacctggaggtcttctgaagtcgactcgcgtggagagacagtgctgacataaatatagtaatggtgcaacggctatacgacacgtgagggcctaatggcaagctagtgtaatgaaacctctccataaaataaatttaaaattaaattggaccctcctcataaagaataaatttaaaagtagcaagctagtgtgatgaaacccaccaaaaaataattttaaaattaaagtggactctttccgtaaaaaaataaattaaaagttaaagtggacgtattacccacataataaatattaaattgcgatcactgcactttatctttgccaaaaggctaagaatgttgagttgaaatggagacatgcatcttttttaatagctacctcggtcgcttatcctcctatatctagcgatgtggtattattgagaagtgtttactgcatgtggtttcgtgtcatgttgggtttgaatattttctcagggtcatctaaacgataacaacagtcaagaccacgggtcagattagaaagaaattgtggtacccaattttcaaaaaaagaagttgaagtttattctttctttgtttttctctttcgggtcccgtactactggggtttggagttttaggagtcatacatcagtagcagtagaatttttgtttgacttgtacgcgggggtcagaagcaagcgtgggattggttttgggccgttgatctcgatccggcggtgggaagcccacttctttcccccccaaaaccctagccgcccctccctcttgtttcccttgtgcagctgccccccctcttgtcccttgttttggccgccccccttcttgtatcttttggctgccgccccccatctccaccttcctcaagttcttgcagcccaccacaacaaccctagccaccgcccccaacttcccctcccaaggtgcagccccttccccgcttggatctacgtcgtgttggtgcaagtctccaattggattttggtggaaggaaggagggataaaagggggagaattcaaggtgattttgtgattatctttttgtattagtgctgcaatccaattggttatttgtttacctatgcgaatcggtagaggtgttgtccagaaattttgtgggtgggcgaacagcagtagtattatcagtttctggggatttttcgtgggttattagtagtaatcattgtgacaatcaggtagggctttgtcatacctttccaaagagtacttatgcgctaaattcagaggtatattttaggagttatcgctgtttgaaaccggctaggttgctgtccaaaaacagattgcagggtgtgtcttgtgggctgtttggggccatttagatgttggaatttaatcatcgtttgaatacaaaacttgtggggaattttatgtagatggtttgggagttttttttgttaccactactgtcataattttaaagatatgaaattgtcaagcagcgccactgcagttttggtgggtgatggggagagaggtcgctcgcgacgggtttggaatcgtgcgtatgtgcggcgttgtttatgagcgttggttatgtgaatttgtgcactaagttgtgtgtcaaaaacaggtggtggacctccgggtcgttcttagggccttgtccaaatttccggtgaaggcaagtaaaatagtgatggtttataccgttggttgatttatgtgtcctatacttgattacatccatgttaaatgtgttctttctcgtaatccattttgagaattattgcttgaagctaatcatgttttattatttacatatgttgaagatgttgttcgagcatgttatatgcattgattattatttggaaggaatggaattatatatgtttaacacatgttatttggggtggtctcatgttggtgtcatgcatagtgcatccatcattctttgcatggaagtttcttcgcgatcttatggtccaaccgtaccggtacaataagcatcatatgttgcccgagaaggggtatgatgcagcttcatatccttagaggtatggaggcagaagtcattactgcatctgtagccatgtgcattcacgggtgaaatgtggaacctgttatggtggtgtggatattgtggatattcactttgtgtttcattttggaactgagtaattgttatcttgtttacttgctgcaatttgatattcaagaaggaagttgtgaactatgtggttgttaaatcacggtttgtttacattgtcaaattgttatttgatcattttacttgctgagatgtgtcatctcacacttgcattgtttgatgcaggaacttgatctttgcttttgggaaaggagggaagtagcagcacggtcactacatccttaaataattgtaccactgcttagtaatgatgttaaacagtggtttcaagtcaagggggttgattgttatgaaatagtgcgtgccagggaattaataagttctagtccacttggtggctgactttcttttggtttgctgcattcattttattttggtcattaatgttcattactacctttgcatcctggttatacactgtggattacccatcttttacatcatgtataaactctatgtgcctctcgttatgctactttcaagggaggtgctgccgaatttttctttgattcctgtcttcatttcttttattatgttgtttgagtttgtagagagagtatttggtaacactcattgtgtgggagcattgaggtgttacagaaatatagtgacttctttttttacagaagggacgacacgacagtgaactaggcaaactgacataggagaaagagataacgaaaaccttaattttaggctcgaataaaaactatcaccggaaaaaaaacataaaatgctttcaggatatacatggttttggggagaataaactagttctatcaaatccttttttctagtgtgttccaactagcccgttaaggcgttcctagagtcaatctcgttaactactctaaattaatctaggaagataaagatcatataaattacacacaagaaaaagtaatagatatgtgttttcaatctagcaccaatgagtaaatttgtgtatgtgcattttaggcatggattctgtgctaaggggacacaagagttatactggtttggacagaacgtccttactttcagtcttcgatcgcttgtgctaccgacacctgattgctcgaagtggggttgcaagcgacagagagagggaaggatcccaagtctctgtgagtcgtttgtctaatgtatgacctgatcactagaggctctaagttgcttgtttgttcactctctgtgagcctaggggttttcggttgttctcctcaccccttctactagaggttgatcctattccttttataggccaagggaagggtggcttacatatatgttctctcggaagggagcataatgttagggtaaaagaaatggtttcacccctggttaaagtcttgtcgtgtgccgatatctcttcccgtgcgatcgcctgcagtgcctctgaatttgctggggacttttggtccgtgttggtgaaggaagcccgtgcgtcaccattatttatcctcttctccccacacccaccttctgcctttgtggcccgaccgccgaccttctttgtcgttgagtgagctcgtaggacgtcaggggactcagaccaagagtacataggtcatgagtggggctcgaccttagatttggtagggcgtcgaagggatcagacctagcatccttgggtctcgagtgggcacagaccaaggattcataggctacgagtgggaggaagaccgatgtgcacccacactgtgtcctactgcttcacgtaatcaatgtggcatgtacgaggtgtgcggcgagagcaatccgataggcacgtggcgcccgcttgggtggtcccccgattgatccgcctaacccctcgctccagcctccgcttcgcttcacccctggttcaatgcgcagggatcgttccgcagtgaggcggtttttactcgggcatgcgagcttattgttgtcttcctactaaactgtgggaccctgggggcctagggatttgatctccgacagtgtctcttgagtcactttggggagtgtgtctccctttgggctgatttggtgaccagggagcacaggaggattggaggggattgagggggaaattagttcatttccccctcaatcccctccaatccccccgtgattcacttgtcaccaaatcaacccttagtggcttccttagggtcgagcggtgaccattccatttttctcttgtttctcgatttttatgcttggggagcaaggattctctaggggtgctgctggttcttggcccccttctctccggggttaggattaaccctcgtccaggtggtacaggccgttagggctttcgagctaaaacttcgcgggctagggtgtttgcgcactatgccacgcgacacttggctaattctttagtatcagaccatcaggtggccagtgaacgttattttcttcagattgctgaaagggaaatagggttaaccatttcctataattaatttttgtggttgacgaccaacacaaacacatggactaactagtttgtctagaattcatgtattacaggtgcataaggttcaacataaaccaagaaagatatcaagttagggacacaatttaattggagcaaaatgacttgagtgtgctggaaaatggtgcactgaacattgtccggtgtgccagcggagcaacgactccctgggccaacggtcgactctgcaaaagcaatagtgtcgtgacagagtcagaagcgcagaagtcagagggcaccggactgtccggtgtggcaccagactgtccggtgcagctagaagacaaaggtctccaacggtcaactgctcaaaaccctaacgattgcgctgacgtggcgcacaccggacagtgcatagtgactgtctggtggcgcaccgaactgtctggtgcgcccatcgccaacagaattcagccaacagctagaagtggttgggaggctataaatacctccaaccacctcattcacttccatccaagccttctgaaatcttcattcattgcaagagcaaaagcccaacgctccaagacacaatcaaagcaatcaattctctcaaagtccccaaaatcaactctagtgcattagggcttgtgagaggatcaattgtgttcttttgttgctcttatcgcttggattggcctttttcttttcccttctatttatcaagtgacttgtaatcgaagcaagagacacctgtcggtgttttgggtccaaccgcacacccggggttgcccctcaaggtgtttctaggagtaggaaggtgtcgacgactgtagcaaaatggttcgtgccaatcgcacgagggacagtggacaagatttacaggttcgggccgcttagagatgcgtaacaccctacgtcctggcgagtatgcttggtgagcgtggttacaagagggctctctggattgaagacacatagagctgatgtgggtggctaagtaagatagggtcgatcgttctgaaggggtgccccctaggccttatatactcgaccgtggggtagtacacgtggatatgataacaacaagtagctaaaaggtaatgaacctcttgagtttatccctacgtaaccctcgccgacttatccccgcatggctccgttgcatgggggcttcagcgcgggaaagtcgggtctctgttgcgattcactcgctcgacgttgtgggccgtccgggtttgcaccaatccagcttcacgtcgctctgctttgttggttgtttctccccaggctcacgaaagaatgaccttacgatttattgggcccttgggcctttcgtgaggtcttttactcctttagtggacccgggggatatctatcccccaaaagcccccgatctttgggttaatttagaggtaatcagcccaaagatcccaggtccaacttgcgggtgttttgaagaaaaatgacttcctgctgccttctcttgctctgatcactcatttgaccgaagcttggtttcatgcttgtgccttagaggtcggcatttcaatttgtaggattttgaacttcattgggtgcaccggaggtgtacccaatgggtgtagcccccgagctttgagtagattttagaaaataatctactcgaaggtcttccccagaaattatctccatttgtgctcctgcatcttggttgagggttggtcttttaatcttgtcctacgccttagaagtcggcactatctcggcttggaatgataatccatggggtgcaccggaggtgcacccaatgggtgtagcccccgaccttcaaatggattttttaaggataatccattcgaaggtcttcctttcgtgcctctttgctgaaaattatccctttcgtttgtaaaaaattggcataaagctatttgcattatgctttggaggtcagcattatgtcatcaatattttgctgtagaggtcagcatatattttgtctttagcagccgagtttgcaatccgtccatatcttgctaggtgtgcaatttatttgcttctgcgactgattggacgtttgatagacgttctctgtcaagtcttcacgtcgcttctgtcggccatatcttgtactttgctggctatatttggctttcctctgatccttactgatatctcatttttgtcttgaggtattcactgcgtgccctgcacagatgtgaccgttttgaaaaatatactgataattcctgggcgtccccccccaatgggtgtgggcaagggacgacttggtacgctgagtgttttatccggctgcttctgagtagtaatgtgatgggacggcgggtgtaatcatatcctttgcgctgttgactggagtcccaatgggtgtaatgttgcatgaaacgacgtcagccgcctgacgtgtcttcagacgagtggaagtgcttattgaatgctttgcgactgttcagtgaccgcggttggaggtgagcggttgtctttcccttctataaataacaccgttgcccctctggttttttcacatctcttcgctgttctttactgcatccttctcttctctcccgtctgcttccggcatgggcaagagtaacaaacgcaagcgcgagccgactcctccgtctgaggacttcggcgactcggaatactcggaggaggagttctcctccgagtccgagggtctccggctcccgtctctcccccggcgtcgtctgatgattcagacgactcccaggggattgccgcggaagtctggacgtatatccgggccgtcgagcgctccgggctcgagggctcggatgagtcggagtactcctcggatgaggaggactcggacggcggcgaggacgaggatgacgacgacgacgacgacggtggcgactgcgacggtgacggcagcggcagcggcggggacgggagcaagggcagcaccaggggcggcaacagcaagggcagcaccaggggcggcagcagtaagggcagcaccaggggcggcggcggtggcagcagcagcaaggccagtggctaaacgccactggtctttagatattagtgtagtgtagttagaataatgtaatagtaatgtagagtagtatagtgtagtatagtagtagtagtaatgtaatgtagtaataatagggaagcatcaactcgcaaagagttgatttgtaagcttattgtcttcccttaatgaaagaatgacgttggcttcttcttgatgactcgctttgcttgattatggaactgattcttttgagatagtagatgaataacttgggcatcacattgacgcttccagaagtagctgccgagtaatcttgtagtctatatcaacgttttagaaataatgccgagcgactgaacgctatatcagcgtcttagaggcaatgccgagtgattgaatgtcgacgtcggcattttagaagtagtgccgagcgattgaaggtctacatcggcattgtagaagtaatgccgagcgattgaacacgagatcagcgctttagaagcaacgccgagtgattgaaggtcggcgtcgacattttagaagcaatgccgagcgattgaacacgagatcagcgttttagaggcaacgccgagtgattgaaggtcgccgtcggcattttagaagtaatgccgagcgattgaacacgagatcagcgttttagaggcaacgccgagtgattgaaggtcgccatcggcattttagaagtaatgccgagcgattgaacacgagatcagcgttttagaggcaacgccgagtgactgggtggtgacgtcggcattttagaggtaatgccgagcgactgaatatgaaatcagcgttttagagtcaacgccgagtgatgaggtggcgcatcggctttttggaaataactgccggatgaccacgtggcctgctggggttttggaaataaccgccgggtgatgactggacactttttgaaacgatatctggctcgagaatatcccataagagctgcgcttttagccgcctttgctttccgtgccctagttcttgcattctcgcttccgaatcctctctgccattcgcctcctactctgctcgctggtgaaatcgagatggcgcccaagaggaagactgcgagctcgtctgctgcggtgatccctccgatcgaccccaacagccagttgcctttcgcaggtaaccatatgtccatcatttccgaagctgaacttctccacctcgtatccatcggggttctttctccgcgggaactctgttcttggcggatttgccacgggactactgtcccgacagaggatacccacgagtctgtagtttacgctccttttcttctccgcggcctcggccttcccatctctccctttttccatggcctccttgatttctaccacattaacttgacccatttcaaccctaattccattctgcaaatctccattttcgttcacctatgcgaagcctttcttggcgtgctgccgcatttcggtttatggaagtatttgtatcattgtcgccctgggatggccgggggacaacatcagttggtcggaggtgccagtttagagatgcgtcgcgggcggaaaactgagtatcttgagattcccctcaaggacagtattaagggttggcgtctagagtggttcatagttgacaattatggaaattctctcccctcccggtcgggaagacagccagacgttcgcactccgagctggaccgagtctcccacagatcaggaagtagctgaggcaggtgtgttgctaactgaagttggactgctgaaagagagaggtctaactgctgaagctgtggttgccgactttgttttcaagaacattcagccactgaaagacagggcctatccagcatatctgtatcgagggctagccgactcaactcgggttaccaataggagaattccttctgttgacttggtaagccgacttgaaatgatcctcaggggtaaggtgtcaaatgttggtgctccagtggcatactcagcctggaacctgcctcctcccaaagccttcaccctttttgtgtcaaatccgcccgtgactgatggcaatttgggccttagagtgcgaccctctgctgaagaagtcagtactttggttgcttcgcttggggagattcctgatgacgaacggcaggtccattttgaggtgccctgaaccctagtgatgcggatataaatgccatgcttgatctgctagctgaggattcctccgatgctgctcctactggtacgctggcagtggtgcccctcccagaggttgatacagctttggatgtccagaaacccgtcagtactcgcccgaggcgccctaaccgaaccagtcagcccgagccttctgctgatgagcaaaagaagaaaagaagacgcctccggcgagtatccagttttgatgaggacgctggtacttcagttcctgctactgaagaagtgcctgcgactgggcttactgatgctgaccccaatgggtgtacccaaactactactgatcccaatgtgggtgctccatctgttgctgatcccaatgggggtgctgcttgtgttgctgatcccaatgggggtgctgcttgtgttgctggtcccaatgggggtgctgcttgtgttgtcactgtggaagatgtggaggaagagaatgaggctcctttaactcggaaaaatagtcggcagttcatcgccagcggtgaaagtagtggagttccttctcctgctttgtctgccatcattggtctgcaagaactgtccctggccaactttgatcaaactcttgaggatatggtcccagaggacttgttaacagagccagtggatgatgatgcaacggaggcttgcgctgctgtgcctgatgctgggttgaggtcatcccgtgcctcgtcgaccttagagcgcgatctcgagggtcgggatgctgacttggattgtcctggtcccatggaagtggctgaaggcccgtcaaccttagaggtggttactgcggagagcctggacctcaagaatggtgctgacacatgtccagcccccgagggtgtcgccggggatgacttagctcgggtgaagagtgtaagccactgcccagcccccgagggtgctgccggggatgattcggctcaagtgggcagtgccaactatgacccagcccccgagggtacccaggcagggtctccttcctgcacttccatggacgttcacgcgggatcacctccatactctagctgcatggtggtagcccaaactttggaccagggagtcgctttagagggcagcgtccccgctgatcgggcatttggctctgttgaaggtactgagctgattcctactggtccgttgcaagctgcttcgggtggtggccttgcgcatggttatcagctgatttctcctgatttggggatcccttcgttcttttccaacctccaggtactgtgctgtattttagcttgatctttacattgcatgagcttttgtcattatgttcatttgttcttctcatcaggctttggtggatgggatggccagccagctgagattgcagggtgcttccgtcccagaagtggcttcgtctcttgcgtgttggaatccagtgtcacttcatcgtcgcgtatccgagttggaggcaactaatgctggttagtgccctttttcttctcttcgcctttgttgtggactgttttaccttctgacctcgttttgtttgattacctcttgctaggaatgactcggcagattgcagttcttgaggaaaaacattcccgagatcaggctgaaatggttcaacggtgcgctgacttcgaggagaagtactctcggagccaaactgaactaaatcgggtatccgctgccttggatgacgccaatgccctgagttcttctcttcatgctcggcttgactctgaaaaggtaacttacaaaactgtgctttgctttgctatgctcctattacttgcttggtttctgaaggagttgatttttgtttgcaggaagaaaaacgtatccttgctgcttctcgtgacaatcttgacagattgtatcgtgattctagtaactcgctgatcatcttggagaggagtcaccgctttacaatggaggaactggacaatcaacgttgtaagctgcaggaatctgcggatgaggtgacccaccttaagcaattgatatcagcaaaggatgccaccatcaaagaactccgagcttccaagaaatccattgcccaggaattagaggctgctcggctggctgctaaagttgccgaagaaactgctgctactctcaaagcccagcgcgataaagccatggacaaggctattcgggcgggacgaatcttaatgaggagacccggcgtggttgttcctgaagacataaaggctgacgtgaatgctgcccctgattcctcgagtcgcccttcttcgtcggtcgcacctgagaaaaacattgcgaaatagagaaatattttgtgtgctttgagcgcgcggttagcatgatcgagtatttgttagaggacatcagttcagcattcgaatgatataattactctcttattgtatcagaattcatcagttcgtaaatttgcagtaatgaaacgacgcacgatgattatgagatttgtttgcgggatatagaagtcatcccctgaattgcataggcatgagtatgttgcaccggctttagtcgccactgactttagccgattgctccgtttgtagggcatagtgttcaccccgagttaagtaagcgtgagcatgttgcaccgccttaagtcgttgccaacttaagtcgattgctccgtttgtagggcatagtgttcaccccgagttaagtaagcgtgagcatgttgcaccgccttaagtcgttgccaacttaagtcgattgctccgtttatagggcatagtggtcaccccgagttaagtaagcgtgagcatgttgcaccgccttaagtcgttgccgacttaagtcgattgctccgtttgtagggcatagtggtcaccccgagttaagtaagcgtgagcatgttgcaccaccttaagtcgttgccgacttaagtcgattgctccgtttgtagggcatagtggtcaccccgagttaagtaagtgtgagcatgttgcaccgccttaagtcgttgccgacttaagtcgattgctccgtttgtagggcatagtggtcaccccgagttaagtaagcgtgagcatgttgcaccgccttaagtcgttgccgacttaagtcgattgctccgtttgtagggcatagtggtcaccccgagttaagtaagcatgcaagtcaatcgtaaatgagctgagtatctttgaaatctctctttattgatgacatattttcagtttacagaatacattgttgccccagcagttttgaaatacagctagggataaaactttctgaggtgctctatgttccaggagttcccaacttctgtgccatccatctgagtgaggcgatatgatccgggccgagtgacttctgctactatgaagggtccttcccataagggtgataacttgtgccgtccctcccccgttagaattcggcggaggacgaggtcgcctactgaaaagaaccgttgccgcacagccttgtcgtgatagcgccttagagtctgctggtaccgtgctgattggattaccgcattcagtcgttcttcctcaagtacatcaatgtcctccagcctggtggcctcagcttctgctatgctttcgaagatcaaccttggcgccccaaacttgagatcagcaggtagcactgcctccgacccatagaccatgaagaaaggagtgtttccatgcagggctcgactaggttgggttcttaggctccaaacaacataaggcaattctcttatccactttcctgcgaatttttcattcttatcgaagacctttttcctgagtgcctccaatatcattccgttggctcgctcaacctgcccgttggctcttggatgtgctacaaacgcgtacttgatctgaatgctcttttgctcgcagaaatcgaagaattctgaactggtgaagttggatcctaagtcagtgatgatgttgtttggtatcccgaatctgaatattatgccttgtatgaattccacggccttagcagaggttaaagaagcaatgggcttgaactctatccatttagtgaatttgtcaatcgccaccaatacatgagtatatcccccttgagctttcttgaaaggtccaatcatatccagtccccagcatgcgaaaggccaggttactggtatggtctgtagttgctgtgctggcatgtgctgttgctttgacaagtattggcaagcttcgcacctctgaactaactcggctgcatcgttcttcgctgtcggccaatagaatcctgacctgaaaaccttcccgactagtgttctggatgctgcatgaattccacattgccctgcatggacctcctccagaagttgcttcccagtggacgggagaacgcacttcatgaggatgcctgatgcgccccttctgtacaatatctccccaatgagtgtatagtgagccgactgcctggcaatgcgctctgccgagttcttgtcgtctggttcttcttcattctttatatacttaatgatcggctttctccagtcatcagagtctgactcgggttgatctatgatgttgcactcttctgtttgatccattgagatactcggctgcagaatttcttgcacgaagactccgggtgggacctgagttcgactggatccaagcttggacagtacgtcggctgctgtattccgatctctttctatatgatgaaattccagaccctcgaatttatcttccagctttcggatggcagcgcagtattttcccattgaatcgcttgaacaatcccattccttatttatctggctgatgactaccagagaatctccgtataccatcaatctcttgacgcccagtgatatggcgatgttcaatccgtgtatcaaagcttcatacttggctgcattgttagaggccgggaatagcaactggagggcgtacttgaggtgttcgcctccaggtgcggtgaagagaatccctgctcctgctccctgcagcttcaacgagccatcaaaatacattcgccatacttctgcagtttctggattatccagtacttgctgctctgtccattctgatacgaaatcgaccagtgcttgagttttgatggcagtgcgaggtcggaactcgatgtcgtgggatcccagctcgcaagcccacttggctattcggccaatggcttccttgttgtgaagaatatcccctattggaaaaccagtgactactatgactttgtggtcgtcaaagtagtgacgcagcttgcgggcagttagaagtactgcgtataatagcttctgaacctgaggatactttttcttcgaggggcctagaacttcactgatgaagtaaacatgatgttgtactggataggcatgtccttcttctactcgctcgactaccaacgcggtgcttaccacgtgagtcgtgcaagagatatacaatagcaaatcttcagccgattgagtcgacgtagctcgccggggtggttttagcactggtggtgttgtcaagaatttcttcagtgcatctagagcttcttgtgcttctaaagtccattgaaacttatccaccttcttgagtagcttgtaaaatggcaaacctttttctcccagcctggatataaatctgctcagagctgccatacatccagtaagtcgctaaaccttcttttgtgaccgaggagcttccatcttcatgatagcttcaatcttatctggattagcctcaattccccggtggctgacaataaacccgagcaactttcctgctggtaccccgaaaacacatttttcgggattgagcttccatctatatcgtctcaggctgttgaaaaccagctgtaagtcttcgatgaagttttccgaattctctgttttgattaccacatcatctacgtaagcctccacacgcttgccccagtgatcggctaagcatgtttgaatggctctctgataagtcgctccagcgtttttgaggccgaacggcatggaggtataacagaaagcaccaaacggagtgatgaacgccgttttttcctcgtcttcttttgccaaactaatctgatgatacccggaatagcaatctaagaaagacagcacagaacatccggtggtagagtccaccacctgatctatcctcgggagcccgaagggatccttcggacagtgtttgttgagatcagtatagtcgacgcacatgcgccaatccactttattctttttgagtacaagaacagggttggctaaccactcggggtgtaatacttctctaataaatccagccgcaaccaagcgagctaactcggagcgaatggcctctctcttgtcgggcgtgaaacgacgtagcttttgccggatcggcctcgcctggggataaaccttcaacttgtgctcggccagttctcttgggactcccggcatatccgcaggttgccatgcgaatacatctcggttatcttgcaggaactggacgagcgcgctttcctatttgtcgtccaagttggagctgatgatggctgtcttgcgctcatcggcgaaccccaggttgattcgcttggtttcttcagtcggccgcatagaggtcgcggcttgagcttcgtttgccggtactgtgaggtcctcctcaggcttagagttcgccagtgtagaagggaccgtcgacggcttggtggtgagggctgcttggatggccactcggaaacattctgcggcgccttggaagtcggcgcgcacagttatgatcccttgcggtcctggcatcttcagtatcatgtatgtatagtgcggaatggccatgaacttggccaatcccggccttccgatgatggcgttgtacccgcagtcgaagttcgccacttcaaaccttaggaactcggttctgtagttctccggagttccgaaggtgaccggcatgtagatgtggcccagcgggtactccccctccatcggcacgatgccgaagaaaggagtgtccgacttgtggagctctttgaggtgaactcccaagcctcggagtgtccgggggaaggtgacgttgatgctgctccccccgtccactagcaccttcttcacccggctctctcggatcaccggatcgacgaggagcgggtatttgcccggatggtcgaagttgagccattgatcctcccgagtgaaagtgatcgggtgttctgaccaccggtatggggcgggaggaccggtggtcgccaccagtatctggcggtcgttgagcttttgttgtctcttgttctcctgcgacccatgtccgccgaagatgacgttgacctccctgtcgacgcgtgggaaagctcctcctcctccctcctccggctgatgaggttgtcgtggttcatccggtcctcccctcggcggaggaggaggtagaggttggaagggccggccatgcccaacggagtgcttgaagtcccggcagttgcgaagagtgtggcgcatgtccttgtggtatgggcactgggcgtcgaggatgtcgtccagcgtgcgttcgcctccgcggggtcctcctcgggcgcgagaggcaggtggtccggcggagtgtacttcttcgcgaggcctcttctcccagcgtttgtcgggtggctggttcgcgtcgcgtcgtggggctgccggtgcaggctttgttcctccgatgaggtcctgggcccgctcgtcggcggtgatgtagaggtcagcttcccggaagagctcctcggaggtagtcggcgccttctgtagtatggctcggacgaaagccgagtcgttggatcctctgtagaagtcctcgatcacggccgcctctgtgacctcggggatacgatttctcatggtctggaaccttttgaggtacgaccggagagtttcgtccccctggcgcttgatggatttgaggtcccacggttgcgctggcttgtcggagagggactggaagttggcggtgaaacgccgactgaagtctccccagtcgtcgatgcagtgtcgaggtagatgtcgtagccactgtagcacatcttgcccaaggacaatgggcaaatacgcggtcataacgtcctcagatgccccggcagctcgagcagcggtggtgtagacggctagccaaccccctggatcctgcttaggttcatatttgtcgatattggataccttgaagttgggaggccattggatggccctaaggcgcggagtaagagcggacactccgcacgtgtcctcctgtcgtcggggacgatgtttgtcccggggaggggagttgtgattgtggttcctcgaccgtccccgagtggtaccgccagttgaggccgttgccgactcagtcctggtggcctgactctgagtcgggatgacgtgatcccggtcgtactcctcccgacggcgaatctcgttctcatgccgccgttcgcgcgaagcattgatggagcttcgcgcgtctcggcgactgttgatggcgtgtcgtagatcgttcggtgggtgagcgagcggtagaagatggttggctgcctgggtgaacaggcgtcggtatccctcggcgtcgggagtccgaggaagtccatcagctatccgagctagtactcctccgacttcgcttggcgtgttcatagctcgggcgaagtcaggattcaggttgcgcccgaagagcgaattctcccggcgttgtcttgcgtcttgctcagcttgttcctgagcccgtcggcgatcacatcgtcgggagttccttcgttctctgaagacgcgttcttccggagtttctcctatctccgagatctcgtctcgcgagacaggctgctccggatcccgttctccggccgcgtgatgtcgccgaacgttcctgcgtcgattcctccgtcggcgggattctcgttgaggcggttcctctccgggcgcggtcggttcgtcgtcggagatggtgggcgactccactctcccgatgaagaggacgtcggggtagaatggtgctgctgtcgtggcgactttctttccattctcctttgaagccggaggaacggaaagaacgacttgcttttccctggtctccttcttcctcgcgatccgtgtccattcttttgtcggggaagtagacaacggagtcttccgggtcagcgagccctcggcccccgactttccggagacgatcttcttccgaagagctagaggttgcgcctctccggcattttcggagttcgttggaggagacttcttttccggcggatccgcgatacgatgtagaattccctcttcatccgctacagatgagattgtcccgaagcagaatacggatccgggacgcatggtgatcttgctgtagaaggtgacggccattgagctagcttggatcgtcgacacaccccctacctggcgcgccagctgtcggtgttttgggtccgaccgcacacccggggttgcccctcaaggtgtttctaggagtaggacggtgtcgacgactgtagcaaaatggttcgtgccaatcgcacgagggacagtggacaagatttacaggttcgggccgcttagagatgcgtaacaccctacgtcctggcgagtatgcttggtgagcgtggttacaagagggctctctggattgaagacacagagagctgatgtgggtggctaagtaagatagggtcgatcgttctgaaggggtgccccctaggccttatatactcgaccgtggggtagtacacgtggatatgataacaacaagtagctaaaaggtaatgaacctcttgagtttatccctacgtaaccctcgccgacttatccccgcatggctccattgcatgggggcttcagcgcgggaaagtcgggtctctgttgcgattcactcgctcgacgttgtgggccgtccgggtttgcaccaatccagcttcacgtcgctctgctttgttggttgtttctccccaggcccacgaaagaatgaccttacgatttattgggcccttgggcctttcgtgaggtcttttactcctttagtggacccgggggatatctatcccccacaacacctaagtgtgtggtggtccttgtggggtctaagtgacccaagagattaaggaaaaggttcactcagtctaagtgatcgtttgagagagggaaagggttgaaatagacccggtctttgtgacctcctcaacggggactaggttctttggaaccgaaccttggtaaaacaaatcatcgtattcactcgacttaattcttgtttcatttgttttcccctctctaacgtttccttgctattgtgaatttgagttggctcccatacgtcatctgtaatccttgagcaactcctagcaagagagatattcttttggacttgaatttaattctaacgctaacccccgaccttagtgtgtgtttaagtttataaatttcagattttgcctattcacccccctctaggcgactttcaattggtaccagagccagtgcttcattaagagtctaaccaactcgaagtgatgtctggagatcacgccaagagggagatcatgaccggcgaaaaggccacaagcttggggaggactctctcaagggagtccggcaactaacacaagaaggaatcctcttcctccatcaagtcgcatcggagaggtgacaagaagaagaagatgaagaaggtggtctactacgagaccgactcttcgtcaccctccacatcaagctccgagtcgtccagtaatatgccctacgctattccccatatttcaaagcgcgctccattactttccgttcccttaggaaaaccaccatattttgatggagatgattattgcatgtggagtgataaaatgaggcatcatctaaccacactccacgaaagcatatgggacaacattgaatttggagcgcaggtaccaaaggtgggggacaaagactatgactcggatgaggccgcccaaattaggcactttaactcccaagccacgtctatactccttgcctccttgtgttgggaggagtataacaaagtgcaaggtttaaagaatgccaaaacaatttgggacatcctcaaaaccgcgcacgaaggggacgaggtgaccaagatcaccaagcgcgaaacgatcgagggagaactcggtcgattcatcctcaacaaaggagaagagccgcaagccatgtacaaccagctcaagaccatggtgaaccaagtgcgcaacctcgggagcaccaaatgggatgaccatgagatggtcaaggttattcttagatcccttgtatttcgcaatcctactcaagttcaattaatacgtggggatcctagatataaactaatgtctcccgaggaggttattggcaagtttgtgagctttgaactaatgatcaaagactccaaacacattgtcaacttggagcaaggtgccacctccacacccgaggtgcaacccattgcattcaaagcaacggtcaacagaagaagagaaggagtctacatcaagtaggcttccaatcgacacctccaagctcgacaacaaggaaatggcgctcatcatcaagagtttctgccaaatcctcaagcaaaggaggggggaggactacaagccccactccaaaagggtgtgttatcgatgtggtaagtccggtcactttattgctaaatgcccaattctagtgaaagtgacagggacgaagacaagaaagggaataaaaaggaaaagaagagatactacaagaagaagggcggtgatgcgcacgtgtgtcgggaatgggactccgacgagagctccaccgactcctcctccgacgaggacgccgccaacatcgccatcaacaaaggcctcctcttctccaacgtcggccacaaatgtctcatggctaaggatggcaagaagaagaaggtatactctagagccaccccaaaatatactacatctagtgatgagggtagctctagcgataatgaggatgatttactttctctctttgccaaccttaacatggaacaaaagaaaagattaaatgaattaattgaaaccattaatgagaaggatgacatcttggaatgccaagaagacttgctcgttaaagaaaacaagaaatttgttaagttgaaaaatgcttatgctcgggaaatagaaaaatgtgaaaacttatataaggagcttagcatttgtcataattcaatttcaagtcttagaactgagaatgctagtttagtttctaagattgaaaagttgaatggttgcaatgattcaatttctagtcttagaattgagaatgataaattaaatgctaagattgaggaattgaatgcatgcaaaccatctacatgtactgttgatcatgttactatttgtaatagatgtagagatgttaatattgaagctatggatgatcacctttccataattaaacaacaaaatgatcacatagccaagttaactgctaaaattgccaagcatgaactagaaaatgaaaaatttaaatttgctcatagtatgctttataatgggagacgccctggcattaaggatggtaatgggttcctacaagggaaccaaagcaatgtcaaacttaatgcccccaaaatattgtctaattttgttaagggtaaggctcccatggttcaggatagtgagggttacattttatatcctgcaaactatcacgaacacaaaattaggaagattcatactatatgaaacctcacaatgtttctcatcatgcattcatgtataaaaataaggcttctagctctaagcataccactcatattaaaatgcctaaaacgaaaattcctaatgcatcaaatgaacataacatttcatttaagacttttgatgcttcatatgttttaactaacaaatcgggcaaaatagttgccaaatatgttgggggcaaacacaagagtcccgagacttgtgtttgggtacccaaggtgcttgtttctattgtgaaaggacccaagaccatttgtgttgtaggtttatgcatccggtggttcaggttggataatcgatagcgggtgcacaaaccacatgacaggggagaaaaggatgttctcctcctacgagaaaaatgaagatccccaatgagctatcacattcagggatggaaatcaaggtttggtcaaaggtttgggcaaaattgctatatccctgacattccatttctaatgtttttcttgtagactctagattacaatttgctttctgtttctcatttatgcaaaatgggctacaactgtctctttactgatatagttgttactgtctttagaagaagtgatgattcaatagcttttaagggagtgctagattgtcagctatacttagttgattttaatgataatcaagctgaactagacacttgtttaatcgctaagactaatatgggttggctctgtcatcgccgacttgcccatgttgggatgaagaatcttcacaagcttctaaagggagaccacattttaggactaaccaatgttcattttgagaaagacaggatttgtagcgcatgcaaagcagcaaagcaggttggagtccaccatccacacaagaacataatgacgactgacagtccgctcgagctactccacatggatctattcggtccgatcgcttacataagcattagcgggagtaagtactgtctagttattgtggatgattattctcgcttcacttgggtattctttttgcaggaaaaatcacaaacccaagagaccttgaagagattcttaagacgggctcaaaatgagttcagattgagaataaaaaagataagtagtgataatgggacggagttcaagaactcacaaatagaaggttttcttgaggaggagggcatcaagcatgagttctcttctccctacacaccacaacaaaatggtgtagtggagaggaagaatagaactctactggatatggcaaggaccatgtttgatgagtacaagacaccggaccggttttgggcagaggcgattaacaccgcttgctactccatcaaccgactctaccttcaccgaatcctcaagaagacatcttatgaactcctaaccggtaaaaagcccaatgtttcatattttagagtctttgggagtaaatgatttattcttattaagagaggtagaagttctaaatttgctcctaaggcagtagaaggctttttactcggatatgactcaaacacaagggcatatagagtcttcaacaaatccactggattgattgaagtttcttgtgacattgtgtttgatgagactaatggctcccaatggagcaagttgattttgatgaactagatgatgaagaggctccgtgcgtcgcactaaggaacatgtccattagggatgtgtgtccaaaggaatccgaagagccttcccaaacacaggatcaaccatcatcttccaatcaagcatctccaccaactcaagatgaggatcaggctcaagatgatgaagatgaagatcaataggatgagccacctcaagaggaggacattgatcgagggggagatgaagataatgaagacaaggaagatgatcaagaaattaaggatcaaagaccaccacacccaagagtccaccaaacaattcaatgagatcaccccgtcaactccatccttggtgacattcataaaggggtaaccactagatctcgagttgctcatttatgtgaacattactcttttgtttcctctattgagccatataggatagaggatgcactaagagatccggactgggtggtggcaatgcgagaggagctcaacaacttcacaagaaatgaggtatggcatttagttccgcattctaatcaaaatgttgtagttaccaaatgggtattctgcaacaagcaagatgagcatggtgtggtgataaggaacaaagcccgacttgtggccaaaggttattcacaagtcgacggtttgtactttgatgaaacttatgcacccgtagctaggcttaagtcaattcgaatattacttgcctatgctacttaccatggctttaagctttaccaaatgtttgtgaaaagtgccttcctcaatgaacctatcaaggaagaagtttttgttgagaaacctcccgactttgaagatagtgcgtaccctaaccatgtttacatactctcaaagacgctttatgggctcaagcaagccccaagagcatggtatgaatgcctgagagattttcttatcactaataggttcaaagtcgataaagccgatactactctctttactaaaaatgttgcaaaagacttgtttatacgccaattttatgttgatgatattatatttgggtctactaacaagtcaacttgtgaagagtttagtaggatcatgatacataaattcgagatgtctatgatgggagagttgaagtatttccttggatttcaaatcaagcaactccaagagggcaccttcatcagccaaaccaagtacattcaagacatacttaagaagtttgggatgaagaatggcaagcccatcaagacacccatgggaactaatgggcatctcgacctcgacacgggaggtaaatccgtagatcaaaaggtataccgatcgatgagagattctttactctacttatgtgcatctcgaccggatattatgctttctgtatgcatgtgtgcaagatttcaggcaaatcctaaggaagttcaccttagggtcgtgaaaagaatcatgcgatatttagtttacactcctaagttcggactttggtaccccaagggatatacctttgatctaattggtattccgatgccgattatgccggatgtaaaattgataggaagagcacatcagggacttgtcagtttctagggagatccctggtgtcatgggcttcaaagaaacaaaattcagtagctgtttccatcgccgaagccgagtacattgccgcaggccattgttgtgcgcaattactttggatgaggcaaacccttagggactatggctacaaattgagcaaagtccctctcctatgtgataatgagagtccaatccgcatggcggataatcccattgaacacagtcgcactaagcacatagacatccggtatcactttctgagagatcaccaacaaaaggaggatatcgaaatagcttatgtgagcacccacaaccaattagccgatatctttaccaagccattagatgagaaaacctttagcaaacttaggaatgagctaaatatacttgattctcggaactttgattgagacattgcacacatagctaatgaatatacgactaatgtgctttcaagtgcatttctatacttagtcgtagattgaaagggaaatggagttttcggcaaagacaaggcttccactccaactctgacggtatcatttattctttgtcgttactcatgtcactctcattggtatgaatcttcactcatacttattttaccatttaagagaacgtgttaggccccaaagggggagaaaatgcaacgagggctctcaagttctccgtttttggcgattaatggcaaaggtggagaaaatattaagcccaaagcaaaaggaccgcaccaccatttaaaaaaaattcaaaataaatttcacgggtcactagcaaagtctaggtaaaagtagtatagaggcttccatgcatcactatatgatggtgcaccatcacattgccattctcatgaacaccttctttgtgacatgtcatatgtttggttgtatagctagagacatgcaactatttcatacgatctttaaggggcatcatttgaagtacgttatgtggaaccttggtcatcacatcctcatcatcatcattcacaacctcaatgtacctcaatttgccacacactttacacttctcctctttctcattacctttctataaaagcatataaccatctttatacacatcaaccttctcatatggcatgcttctttgaatggtatatgtctttgggcatcttgtgattttccagaaggatatcgctgatcaaatttataagctccttataacatttacttgagaatgcaaacttggactttatagccataagtcgggtcacaaaggcgagggtggacacaattgtgtgttcgtgtattggctcttttgaagctctaaggagctacaagaaccttttaacctcctcggtcattgaatcctctaaatttgggtcatgctatgagagtacatcattaaccaccttttccatcctatcatcatcaattgtatcatcatctatctcttgtgttgttgcttgtgttgtcacttgtgtctcatgctgatgttgtgaattatcatggtgtcaccacatctcgtatcttcatatgaaaccataggtacaaaggtggagtgttatcattctttagtccttgcatttatagttgtggcaatttgtacatgggcataacacatcagtacccgttgtggtttcttacaaactaaagccacacccaacaaattcctaagttcttcaccatctaatcatgagagtgagatccaatcttattttaaccataatacatccatcgacgatcctcactcataatgtaaagggtagagagcatgtgttaccttgtcagcagaaggttgaagatggcccaacaacaccgcagtggcgcagatcaggtggtggcgaggtcgacaacagcgcacatacgccagtgtcctgtgggaaggcgtggcatggtggggtagccacgatagtggtggtgtgcggcaggtgtggaatgcaataatagactgggcgcgaggagggcaatgcatggctacacaacgtgacatgatggtgtgacggtgagaggctgcgcaaccgtagggggcatgcagcatggggcagcggcgtaatcacgatgtgcggcgtgagaagagcagcatgtggcgatgagatatgcgagcaagacggacgcggctagcgggcgcaactcatcgagccttgtggctaggctggatgggtttattccactaagagcaactccagtagttctctaaaagacttcctaaatcaataatttaggtagttaacataaaaactattctccaacagttctctaaatgaactttctaaatttaacaacttgtcatctaacctcattttctctctacatttggcaatcatttaacaactccctaaacaaaaatattgactgcattatgtagtttttgtgacttatttttttatgtggatagatacaaaacaaaattacaacctatatttagagaactattggagaactcacatttttttactccaaaagtcatttagcaacttcttaaatctacgatttagagagctaaaatttacacaactattggagttgctctaactttcgttgactactgacacaacctatggaagtaatttgtggctttcatggttttgttagtaggtaacaaaaataattaattttcatcagtaatcgacacggtcgacaaaaattatgaataacttttatcggttgaacgacgaccgacagaaactatttaattactgtcgactaccctaaatatcgacaataattaacggggccaacgattttttagttttcatgtgttgtataaagatggtcatgcgttgttgtcgttgccaaaagggttaggaataaaaaaacagttcagttgggttatttttaaaatcgtatgtataaatagtaaatggagaatggctatattcaaccatggaatctcttcccaagttggaggctcgaggtgaatcttggagattcccttccattgttttcaaggacaggaaagtaattgttctttttatgacaatttttataggatctttatatataacagatctatgcttctaatgctatcagtcttgttttttgcccttcgtgttcaccaagtgccactattgtttatggctcaattaagaaatgtgttggcggctaaagtggctcttcaattgtactttgggccgtcatttggagcagacaaagctgcatgcaaggcaaaatggcagagatgttgttgttgcattgcattggacctgaatgcgtccaactacaaagggaatgaatatacgtgctgatcaaatggttgctccggtcagattgttagtactagtgcacaagcaagctagtgcggcggctgattccttgcatgtgaaaaagctttttgtcgtcatgcatggtagtagttactcgtatggttctttaattacgcttaggactgtacttggaccggttaaattagattattattagttctgtgaccgagatctgattgccatgaactgtacttgactgtttaatttaactaaaaaatatactatctgatattttcatttctctagatagtcatggagtatatctgtatatgtatatattaaaaataatgtatcttaaagagttaaagcgttttattatttagaagaaaaaaatatttatcatcatcatatattgttgattcaaccgtgtgatcgggacagattcagcctaggcgctaggggtgcttgagcaattaatgagcacccctaccctcatgttgttcatatagaactttcatgaagaatcccttgaaattctaactatagatgaaaaaaagataaaaacgacaagaaaaaagagaaaggaatgaactctctcatgatcctggattggtccctgatcattgacagtgatgactgatatgaatacctatactttgacggcgaccattggcctacgatctgtatctcctgcacaccgtcacctttacacgcatgcaatggtcttgtggcacaactttcgagatggaatattcctactgtgcatagctaccatacacacacacgcttgtgcaaggttgattcctctgcaggcagtactcgtgtccccctcctgctgattctcgacttgcactagacaaatgcatccatatttatattagtaggcaatcaaacttggaatattcacgagaattaatataagaaattaatcttttccgctttgtggtacaataatgtataaattagtagagttttcagtaaggtacagtagtaggccaaacatatgtacgtcagtacgtgtagtacttgactctacatgatgtacaacattatcactatcgaacacgactactttgtcgtcgagtgtttcagacactcggcaaagctcagaaaacactcgataaactctttgccgagtgtgactttcagtaaagagatctaggtgaattatatatcggcaacgacttctttgtcgaatattttttgtcggacattcggtaaatgttttaccaagtgtcacctgttactcggcaaataaaagtcgctgtcacggcgccaagtgacgatgacgaagcctttgccgagtgtcctccctgacactcagcaaaggctccctctttgccgagtgcctgctggactagcgctcgacaaagaaggctctaacgggtccctttgcgagttcctttgccaagtgcttcgggagccactcaaagggagctttttcttgctgacggcgctttgctgagagccctttttacactctctgcaaagaagtatccttttatgctgagagtttggctctcggccggcagaaactctcttcgcctagtgactttctacaccaagtgtagtatttggcaaagtatgttttgccgagtgcccgataaataactcttgacaaagagctagacactcgacaaagagtcgaatttcagtagtgtatgtaacatttaggacgtgcacttctttttaaaattttgtgacaaacactcctttttttacatgagcgtttgtaaagtacttcctcttttaaattataagacgatttgattctctctctctttatatatatatatatatatatatatatatatatatatatatatatatatatatatatatatatatatatatatatatatatatatagtcgaggtcttccaatagttacaccaaacctcagccacccgctggaccgtgcctaacacctaggcgcatgcggtaggttgcgtcccaacgcgcatcagtcaaacctccggtccaacacctaccctccagcgtgggacacacacataaattgtggttctgttttttcgcaaatagcgtaaatagttcacagaaaaaacgtaaatagttcataaagatagcataaaaaccccacatagccactagaccacgtccacacgcctaggtgcatgcatgcagatcctattcttatggtagatccgataattatagcaggtcatgggaatttcccttacatgcacgcaaaaatttcatggctccataaatataggatcgctccaactgtcatgcagctaggctcattaaaactagttttatgatatatacttgtcggggaccataattaggggtaccctcaaggctcctaattctcagctggtaacccccatcagcataaagctgcaaaggcctgatgggtgcgattaagtcaggaatcggtccatacgagggactcgatcacgcctcgcccgagcctggcctcggacaagggcagccgaccccggaggatctccgtctcgcccgaggcccccctccagcgacgaacgtgttcccggctcgcccaaggccctgtcttcgccaagaagcaaccctgaccaaatcgccgcgccgaccgaccaagccgcaggagcatttaatgcaaaggtggcctggcacctttatcctgacgcgcgccccccagccgacagagccgaagtgactgccgtcacttcgccgctccactgaccggcctgacaggaagacagcgccgcctgcgccgctccgactgcggtgccactcgacagagtgaggctgacaggcagtcaggcccggtcgaaggcaccataggaaactccgctccgcccgatccagggctcggactcgggctaagtcccggaagacggcgaactccgctccgcccgacccagggctcggactcgggctaagtcccagaagacggcgaactccgcccgacccagggctcggactcgggctaaagtcccagaagacggtgaactccgctccgcccgacccagggctcggactcaggctaaagtcccggaagacggtgaactccgctccgcacgacccagggctcggactcgggctcagccctagaagacgacgaactccgcgccgcccgacccagggctcggacttgggctcagccccagaagacgacgaactccgctccgcccgacccagggctcggactcgggctaaagtcccggaagacgacgaactccgctccgcccaacctagggcttggactcgggctaaagtcccggaagacggcgaactccgctccgcccgacccagggctcggactcgggctcagccccagaagacgacgaactccgcgccgcccgacccagggctcggacttgggctcagccccagaagacgacgaactccgctccgcccgaccccagggctcggactacgccccgacctcagccgacggtctccgcctcgcccgacccaggggctcggactcgacctcggccacggaagacagactcgacctcggcttcggaggagcttccacatcgcccaacctagggcgcagaccagccacgtcaacaggaggcgccatcatcaccctgccccgagctgactcgggccacagggaacaagaccggcgtcccatctggctcgctccgccagataggcaatgatggcgccccgcatactctgtgacgacggcggctctcagcccccttacggaagcaagaggacgtcagcaaggactcaaccgctccgccagctgtccctccgtcaggctccagcactcctccgacggccacgacatcacaccagcagggtgtcaaaatctctccggctgccacgacgacatgtacttagggcgctagctctcctccgctacacacgtagcactctgctataccccccgttgtacacctgggtcctctccttacgcctataaaaggaaggaccagggccctcttagagagggttggccgtgcggggacgaggacgagacacgcgctcgcttgaagccgctcgctccctctcccgcgtggatgcttgtaaccccctactgcaagcgcacccgacctgggcgcgggacgaacacgaaggtcgcgggattcccacctctctcacgccggtctccggccgcctcgctctccccccttcgcgctcgccctcgcgctcgacccatctgggctggggcacgcggcaacattcactcgtcggctcagggaccccccggtctcggaacgctgacagttggcgcgccaggtaggggcctgctgcgtgttgacgaacagcttcccgtcaagctccagatgggcagtctccagcaacctctccaacccgggacgttgctccgtttcgggagtcttgagttcatgtccctcgacggcagctacgacatgatactccttccaccgccgtgcgacaacgacaatggcgaccgacagcctgcccgccggcggcggaatcgacaacgtcttccccgcgtgatggaagaacaacgttcgagctcaccccgtcctctcccctgctgacggaggaggaggcggggcaaccaaggccaagcaggaggcagcgcctcgtcggctgtcgagcgagtcgacgaccccagcgccccaacggggggcgcaccgggcgtcgacctcgcgtttgagacgaaggcgagcgccgtctccccgcgacacgccaatcctgagcaagcggacgacgccagcacgctcgcgaaaagcttgctggacgtcacccttgtacctgagacgacgacgcagtcagtccccgacgtgacctcatcgccgcccgtcgaccaaaaggtaccgaccgattcccatcccacgtctttcggattcagcctcgacccgcctagcggcttcgctttggtgggcgctctcgtagaggcgagtccaaacccactggggtttcgtatgcggtcaccttgggaccggctgacggacgtcttgacctacgggccctctgggtccgaggaagacgacgagcctagcatctgttgggatttctctggacttggcaaccccagtgccatgcgggacttcatgaccgcatgcgactactgcctttccgactgttccgacggtagccgtagcctcgacgacgaggactgcggcccaagtcgcgaatgcttccacgtcgatctggggggtccctccgaaggcaaccatctcggcatgccggaggacggtgatctccctaggccggtgcctcgcgttgacatcccacgggagctagctgtggtccccgttcaggcggggggccatgacccacagctggagcaaatccgcggggtacaggctaggctcgacgagggagcaggagcgcttgagccgatccgtcgggacgtcgggcaggcatgggtgggccaacctccagccggagaaatacgtcatctgccccagggcctccagcaccgcatcgccgacgacgtcaggttcaggccgccacccgcatctagtggggtcggccagaacctggctgcagcagcaatgcttctccgcacgatgccggagccatcaaccaccgaggggcggcgaatccagggagagctcaagaatctcttggaaggcgccgcggtccgacgggccgagagctctgcctcccgaaggcaggggtacccctcggaacctcatgccgcgacttcccgattcatgcgggaagcctcggtctacaccgggcgcacgcgcaacaccgcgcctgcggccccgggtcgcctcggcaacgagcaccatcaccgcgaccgtcgggcccacctcgacgagagggtgcgccgaggctaccaccccaggcgtgggggacgctacgacaacggggaggatcggagtccctcgcccgagccacccggtccgcaggccttcagccgagccatacgacgggcgccgttcccgaccctgttccgaccccccgactactatcacaaagtactcgggggaaacgagaccggaactgtggctcgcggactaccgcctggcctgccaattgggtggaacggacgatgacaacctcatcatccgcaacctccccctgttcctctccgacaccgctcgcgcctggttggagcacttgcctccggggcagatctccaactgggacgacctagtccaagctttcgccggcaatttccagggcacgtatgtgcgcccgggaattcctgggacctccgaagctgccgacagcagccgggagagtctctccgggactatatccggcgattctcgaagcagcgcaccgagctgcccaacatcaccgactcggatgtcatcggcgcgttcctcgctggcaccacctgccgcgacctggtgagcaagctgggtcgcaagacccccaccagggcgagcgagctgatggacatcgccaccaagttcgcctccggccaggaggcggtcgaggctatcttccaaaaggacaagcagccccagggccgccgatcgaaagatactcccgaggcgtcaactcagcgcggcgccaagaagaagggcaagaagaagtcgcaagcgaaacgcgacgccgccgacgcggaccttgtcgccgtcgtcgagtacaagaaccctcggaagccccccggaggtgccaatctcttcgacaagatgctcaaggagccgtgcccctatcaccaggggcccgtcaagcacacccttgaggagtgcgtcatgcttcggcgccacttccatagggccgggccacccgcggagggtggcaaggcccgcgacgacgacaataaggaagatcaccagaaaggagagttccccgaggtccgcgactgcttcatgatctatggtgggcaagcggcgaacgcctcggctcggcaccgcaagcaggagcgccgggaggtctgctcggtgaaggtggcggcgccagtctatctggactggtccgacaagcccatcaccttcgaccgagacgatcaccccgaccatgtgccgagcccggggaaatacccgctcgtcgtcgaccccgtcatcggcgacgtcaggctcaccaaggtcctcatggatggaggcagcagcctcaacatcatctacgccgagaccctcgggctcctgcgtgtcgatctgtcctccgtacgagcaggcgctgcgtccttccatgggatcattcccgggaagcgcgtccagcccctcggacaactcgaccttcccgtctgcttcggaacaccctccaacttccgaagggagaccctgacgttcgaggtggtcgggttccgagtaacctaccacgcggtactgggaagaccatgctacgcaaagttcatggccgtccccaactacacctacctgaagctcaagatgccgggccccaacggggtcatcaccgtcggccccacgtacaaacacgcgttcgaatgcgacgtggagtgcgtggagtacgccgaggccctcgccgagtctgaggccctcatcgccgacctagagagcctctcgaaggaggtgccagacgtgaagcatcatgccggcaactttgagccagcggagacggttaagtccgtcccccttgaccccagcggcgacgcctccaagcagatccggatcggctccgggctcgatcccaaataggaagcagtgctcgtcgactttctccacgcgaacgtcgacatcttcgcgtggagtccctcggacatgcccggcataccgagggatgtcgccgagcactcgctggacatccgagccggagcccgatccgtcaagcagcctctgcgccgattcgacgaggagaagcgcagagccataggcgaggagatccacaagctaatggcggcagggttcatcaaagaggtattccatcccgaatggcttgccaaccctgtgcttgtgagaaagaaaggggggaaatggcggatgtgtgtagactacactggtctcaacaaagcatgtccgaaggttccctaccctctgcctcgcatcgaccaaatcgtggattccactgctgggtgcgaaaccctgtctttcctcgatgcctactcagggtatcatcaaatcaggatgaaagagtccgaccagctcgcgacttctttcatcacacccttcggcatgtactgctatgtcaccatgccgttcggcttgaggaatgcgggcgcgacgtaccagcggtgcatgaaccatgtgttcggcgaacacattggccgcacggtcgaggcctacgtcgatgatattgtagtcaagacgaggaaagcctccgacctcctttccgaccttgaagtgacattccgatgtctcaaggcgaaaggggtcaagctcaatcccgagaagtgtgtcttcggggtgcctcgaggcatgctcttgggcttcatcgtctccgagcggggcatcgaagccaacccggagaagatcgcagccattaccagcatggggcccatcaaggacttgaaaggcgtacagagggtcatgggatgcctcgcggctctgagccgcttcatctcacgcctcggcgaaagaggtctacctctgtaccgcctcttaaggaaggccgagtgcttcacttggacccctgaggccgaggaagccctcgggaacctgaaggcgctcctcacaaaggcgcctatcttggtacccccagctgccggagaagccctcttggtctatgtcgccgcgaccactcaggtggttagcgccgcgattgtggtcgagaggcaagaagaggggcatgcattgcccgttcagaggccagtctacttcgtcaacgaggtactgtccgaaaccaagatccgctacccacaagttcagaagctgctgtacgcggtgatcctaacgcggcggaagctgcgacactacttcgagtctcatccggtaactgtggtgtcatccttccccctgggggagatcatccagtgccaagaggcctcaggtaggattgcaaagtgggcggtggaaatcatgggcgagacaatctcgttcgctcctcggaaggccatcaagtcccaggtcttggcggacttcgtagctgaatgggtcgacacccagctaccgacggctccgatccaaccggagctctggaccatgttcttcgacgggtcgctgatgaagacaggagctggcgcaggcctactcttcatctcgccccttgggaagcacatacgctatgtgctacgcctccatttcccggcatccaacaatgtggctgagtacgaagctctggtcaacgggttgcggatcgccatcgagctaggggtccgacgcctcgacgctcgcggtgactcgcagctcgtcatcgaccaagtcatgaagaactcccactgccgcgacccgaagatggaggcctactgcgatgaggttcggcgcctggaagacaagttctacaggctcgagctcaaccacatcgctcggcgctacaacgagactgcggacgagctggctaaaatagcctcggggcgaacgacggttccctcggacgtcttctcccgggatctgcatcaaccctccgtcaagatcgacgacacgcccgagcccgaggcaccctcggcccagcccgaggcaccctcggctcggcccgaggcatcctcggttcagcccgaggtaccctcggcccccgagggcgagatgctgcacgtcgagggggagcaaggcggggtcacgcctgatcaaaactggcagaccctgtacctgcaatatctccaccgaggagagctacccctcggccgagccgaggctcggcgggtggcgcggcgcgccaagtcgttcgtcttgctgggtgatgagaaggagctctaccaccgcagcccctctggcatcctccagcgatgcatctccatcgccgaaggtcaggaactcctgcgagagatacactcgggggcttgcggccatcacgcagcgcctcgagcccttgtcgggaatgctttccgacaaggcttctactggccgacggcggtggccgacgccactagaattgtccgcacctgcgaagggtgtcagttctacgcaaggcagacccacctgcccgctcaggctctgcagacgatacccatcacctggcctttcgctgtgtggggtctggatctcgtcggccccttgcagaaggcacctgggggctacacgcacctgctggtcaccatcgacaaattctccaagtggatcgaggtccgacccctgaacagcatcaggtccgagcaggcggtggcgtcactagtaagaatgtgatcatcagtgacgattttctagtgacgctggtgacttcagtcacagattgatacatttctatgaccaaattgacatcttcgtcaacaattacaagggacgaagattagacttgaatattaaagacgaaaatgaaaggaacgtcatagatgaaaatgaaaggaacgtcatagattaatttggcttgatcggctgacgtaatgatgaaataaattggtcacagatgagttttagtaaaaaacggcccacgtgtacacaccacttgacggcgtgggatccttggcctacatgggccgcagttttttgggacacagcccccacctggcgacgcggacccggcccagtacgaagcggtagttagttatttggcaaaaaaaggtgcgcccgcggagcttcgaaccagggacctgcgacttgcgttaaattgttgctaccaccagactacgcacttgttcgtgtacataaagaaactatccgtctgttaacaggtgttcccatatgtcgttatgttaacaggttttcccagccgccattctgcgatctgcatggttcgcctgttctgattttttcctgctgcgatctgcgcttctgcgatcggccgtcaggttacggcacacaacgatgccggcgtctgtcgtcgtccgcttgatcggcaactgggtagcgtcgcagcgaacgagcgatcttgtcgcctgatccattgatccaactgtgttggaagaacggcgtcgtctgcaaacagcgaggcagagaagcttcgggcgcggcaaagcagcggcgtcttgcgcatagctacggcaggcgtggatagaacagcggcagggcggggagaaaagacaaggtttgatgtgctgtgtttttgacaataaggttctatgtgcgtttgaattttatttcatatatgcatgtgtttgatgtggttttcaattttgttcagtgtaatcatagttatggagttaatgcgagttttaatttattgtcaaaatagatggatagaagatgggtttatgggaaacaattcacacctgcatatgtgaaaggagttgaagagttcatgaattttgttactgaaagatacccagaagacacagacattcgttgtccgtgcgtgaattgtcttaatcaaaggttgcgacctcagagtgaagtagaaactcatatacacatttatggaatgtcagctacatacacgaggtggattcatcatggggagtcggcagatacagaagttgagggtatagaggaggatgtcgaaggatatgataatgactttgggatacatatggatgtggacgatcatgtttacgatgatgatcatggagtacctgagatgatcggtgaactgtttgcagcggcagaggctgatggagaagaaccaagatttgcaggagttcttggagattcaaagaaggcacttagtctgggttctagccattcaaaattttcttttatggtgaggatgttgtatatgaagtctcgttatcgaatcagcaatacagcattttcagcaatgatgaagctgatgtccgatggataccctaacagtgagttgccaaaatcatataatgaggccatgaaatatcttaaagaattgggccttggatacgaaaacatccatgtgtgcaagaacaattgtgtgttgtttcggaatgttaatgctaaattgaatgagtgcctagtatgcacggagtctagatggaaagatgaaactggttcgaagcgggttccacataaggttttgaggcattttccactgttgccaaggttgaaaagaatttttgcttcaaaacaaacttcagaggaaacacaatggcacaagaaagtgaggaagccagtcgccaatgtgatgagccatccagctgatggggaagcgtggaaggactttgaccgaaagtacccaggttttgcaaatgatctgaggaacctgaggctagccttagctaccgatggattcaatccatttggcaacatgagtacccagtacagtatgtggccagtgcttgtgacaccgcttaatctcccaccatgggaatgcgtgaatccaacaaactgctttatgtctttactcatcccaggtccaagatgtccaggaaaggattttgatttgttccttgagcccctaattgaagaactgctgaagctatggaagggtgtcaagacctatgatgcatgtactggtaggaagttcgaccttcgtgctgctgtactatggtgtatacatgattatccagcgctggccacgttatccgggcgaacaacaaaagggtattatgcatgtatttattgcgacaagaatctgttgtctatggcaataaggaacaagttatgctacattggacatcgtcgttaccttaaaaggacacattcatggcggaatagcttggatttcaatgttaagcgtgaaaacaaagttgtgcctggcaggttcactgtggatgaggtcctacaagagctagagaaggtgaaagatgtcaggccagggaagcaggctgacattactggaaataaaaggaagcgtagtagtgacggtccaaagatttatagccggaaatctgggttgtggcaattgccatattggaaagatttgatgcttccacataatctcgatgtgatgcacatagagaaaaatgtatgtgaaaatattctttgcacactacttagtataccaggcaagtccaaggacacacataatgcaaggctagatttgtatgatatgggcataagacctgaactgcacttgcaataagatggcaactcggcctgcagggctccacctgctccatatgtgttggggaaggatcagaaagtcgagttttgcaagttcctcaaaggtatcaagtttcctgatggatttgcggataacctagcaagatacataagtgaagatggttcaaaggtggttggaaaactgaaaacacattcttgccacatactcctacagagaatcatagccgctggccttagaggactggtgaggaaggatgtatatgaagcaattgcagagctggggaccttcttcagggaactatgtagtagaaatctacggatagatgttgtgcaacggctaaaaggagatattccattgatcctatgcaagcttgagaaaatctttccacctgccttctttgatgtcatggtgcacttgagtgtccatcttcccgatgaggcaatgcttagaggacctgttcagtatggatggatgtacccaatagaaaggcgactaggcactttgaaaatttttgtaaggaacagggctaggccggaaggatcaattgctgaggcatatatggcaagtgataccttaacattttgttctaggtacatgaaggatgttgacactagatttaacaaggatgatgatagtggtacagagatgccattgcctaatgacatgtctgtttttaagcatggtgctactcttgttggagctactaagactgagtacattgatgatgctatcatgaataagttagtttggtatgtgctacataatgctgatgaagtataggaatatttgacgtaagttagtttggtatgtgctacataatttatgttatgtttattaaatttgaaaatatgcttatgaataaagtatgccatgcagtctgtacagggaggagctatcgcagcaaggtgcacgtccaaatgatgttgatcgaatggttcaacaaggatttgcaaagtggtttatgtcccatgtaagtcactaaacttttatgttataggtttactaaagttttgggtatgcatatgtaattgctcagctgagtaattttgttgcaacaggttgagaagaagtgtaatgagaatccagaattggttagcgaaggactgtgggcactgtcatgtggcccagctcggcgagttaagactagtacagcttgcaagattaatggagtgcggtttagcacagtggatcgtgagaagttcatgcagacacaaaatagtggtgtaatgactgaaggtgaacataacggggagaatatagatttttatggtgtccttaaagaggtaattgagttacaatataactcgaattatcaagttcgtcggtcggtggttgtatttcgatgcgattggtacaaccaagtaggaaagactgtgggcattcgagatgacagccatttcaaatccatcaatgtgcagtcattttggtacaagtccgatccttttatcttggcagaccaagcgaaaaagatattttacctgcaagacacaactccacaatgtaaagatttccgagttgtgcagaaatttgaacataggaatatttatgatgtggctgaaaaatatgagggcagtaatgatgtgcatcaggatgattattgttctgatacagagcatatagtgcaagaaggtgatgataatcaggttctgcacaatgttgaaggtggagaagccagtctaattgaaggcaatttagaggaactaataagaaaaaagaaggaagctgctattattcttgaagatagtgaggatgaggaggaagatgatacaatgtttcaatattttaatgatggtggtgacggcaacaatgatgacatgtccatagaagatgaagatgaagatttctagtattgatagttgatttatgaattgttcagttcagattagtacaacatactgaatgtgtgtctgaaattcagttcatgtttagatgatacaatgtattttctgtattttcagaactgaatgtgtgtctgaaatactgaatttggggtgaactgaacttgtggtgaactgaatgtgtattctgtattttctgtattttcagaactgaacatttgaacacttaatatcagagaaaagattgcatggttattactgatactgctaaagagagacataaagtggtaacagactaacagtaatggcaatatggtatagctacctcgggtaacagactaacagtaatggtatggcaatatggcaatatggcaacagactaaagtggtaacagactaacagtaatggtatggcaatatggcaatatggtatagagagacataaagtggtaacagactaaaagattgcatggttattactgaacacttaacatcctgcagaaggcttgatttatatctcattacatgttagcaacatcgactggttgtagttacatattcattaaaatagataaccaacatcagatatacgcagatcaagatagcttggtctctggaagtaaacaatgtatattattaaatattattgtgctttatgaaagaatgttgaggctgctcttgacataaattatgtacctcgacatcagatatacgcagatcaagttggcgatatatgtaaaattccaaagtaaatgagggattttgaatctgcatataatgaacagcgtttaaaagtggaccaaactatgaaaggcaaccatttcttccgcattactgtcaacagtggctttgtatactttagcaaaagcaccagtgccagttgatcctttgatttgatactttctaccaccttgacacaaggaattgtagtggcagtttagaatctgaactttgaactttggactgggcaactttgaactttggactgagcagagtttacaatctgaactgggcagcaatctgaactgggcagcagagtttactcagaacacccagcaatctgaactgggcactttacaatctgaaaatgcagaaatctgaactgggaagtttacaatctgaactgggcattactgtcaacagttgatgcttaactatggactgggcataacaaaaaaatgcagaaatctgaactgggaagtttacaatatgaaaatgctataatttgccactgtgaacagagaacagtttatgcttacatcctggacagagaacagtttatgcttctaatgaacaaacgtgactggtccaatggtaactccttgctactgtgtgctctgttactgggtagaaaaatgcagaaatctgaactgggcgctcggttacatcctggacagagaacagtttatgcttacatataactgctctctgttactaacgaacaaacgtgactagtccaatggtaactccttgctattgtgaacccttgcgtcttgtgttcgagcttgggataggtaggtttttctggttttgtttacatttttcaatcatttttgtatttttcttttatttatttacatgtatagcaccagtttctccaaatcatttcaaccttttttggggtgttgatggaggtgtaccatgatgttttgtgccggtgcaatttttagaattagtttaactattaatgtaagtatttgttattttactaaagaataagtgctaaaaaaccttaggtggctagaaaaatctagaaacttgcatgtacacttcattttggtgtacaatgttgacaaaaaaaatgcaatttattctgacaaagtggtgacatacatcctacaaaaatgcatacagccctcatataaggctaattactaagtgagagatgttcatgcttgtgatggatctatactaccactttctccaaatcattttaaactttaatggcatgtttattgaaccaacctatgatgttgtgtgcagttatgcatttttcagacctagtttactaattactgtaattatttgttgtatttcgtaaagatatttgttacaataccataacctagctagaaaaatctaaaaacttgcatggaccattcattttggtgtacaatgttgacaaaatagtttcaactcattcggacaaagtggtgacacacatcctaagaaaggcatacatctctcatataaggctaattactaagtgagagatgttcatgcttgtgatggatctatactaccagtttctccaaatcattttaaactttaatggcatgtttattgaaccaacctatgatgttgtgtgcagttatgcatttttcagacctagtttactaattactgtaattatttgttgtatttcgtaaagatatttgttacaataccataacctagctagaaaaatctaaaaacttgcatggaccattcattatggtgtacaatgttgacaaaatagtttcaactcattcggacaaagtggtgacacacatcctaagaaaggcatacatctctcatataaggctaattactaagtgagagatgttcatgcttgtgatggatctatactaccactttctccaaaccattttaaactttaatggcatgtttattgaaccaacctatgatgttgtgtgcagttatgcatttttcagacctagtttactaattactgtaattatttgttgtatttcgtaaagatatttgttacaataccataacctagctagaaaaatctaaaaacttgcatggaccattcattttggtgtacaatgttgacaaaatagtttcaactcattcggacaaagtggtgacacacatcctaagaaaggcatacatctctcatataaggctaattactaagtgagagatgttcatgcttgtgatggatctatactaccagtttctccaaatcattttaaactttaatggcatgtttattgaaccaacctatgatgttgtgtgcagttatgcatttttcagacctagtttactaattactgtaattatttgttgtatttcgtaaagatatttgttacaataccataacctagctagaaaaatctaaaaacttgcatggaccattcattttggtgtacaatgttgacaaaatagtttcaactcattcggacaaagtggtgacacacatcctaagaaaggcatacatctctcatataaggctaattactaagtgagagatgttcatgcttgtgatggatctatactaccactttctccaaaaccattttaaactttaatggcatgtttattgaaccaacctatgatgttgtgtgcagttatgcatttttcagacctagtttactaattactgtaattatttgttgtatttcgtaaagatatttgttacaataccataacctagctagaaaaatctaaaaacttgcatggaccattcattttggtgtacaatgttgacaaaatagtttcaactcattcggacaaagtggtgacacacatcctaagaaaggcatacatctctcatataaggctaattactaagtgagagatgctattgcaagtgagagatgtatagtaccactatgtcaaaaatattttaaaatattataacatgatcataaaccaaactaatgtgtccatgaatagataattacaaaaaaacatagagataaataaaaacaaagaattaatataaaatggtaggcaaaacacaaaaaaaaagtctccttgcaggcgcttgaacctaagagctcggtcttaaagttaagaggtcaaaccattgagctatgcatgtgttttcaatatatacccagccctagtatacttaaacgcattagactccgcattgccaaacacattgggcgccaaaaacattttcgtcgtcgtcactaaaacagactccgctctcatcctctatctcccgcactcctcttatttctcccccactcttctttctcccccacttctccaaacctaatcgccgccgccgggacacgacggctgtcgacgacctgccccctcgaccaggtacctcaccgtcgcccccttacctctcatcgcgtcgatgagctgcatcgtcgccgacttcactcgccgcatcccgctctatctcattgccatccgcatttctctcgccccttccacctaacacgccccatccacattgctctcgctaacccctaaaccctaacatcgctggatttgggtcatcgcagacgaccttgatggtgaacaaaaggaggcacagaagtcagaaaggtccaacccctaaaccctaaccatcgctagatttagtttaattattcattcgttgttatcagagatattgtaaattgatttatgtaatcattatgcactgatacagttgtgtttggttccttacattgtattatatgcagtcacatccatgttttagtagagaacttatgtttctagtactggtagacaaggttcaagaaagcgcgattaggcgtgcgattaggcgcggttaagcgctaagcagagggtcaacgcatcgcttacctactaagcgggcaattaagcgctggccctgcttaatcgtgcccattcggcatgtttaagggagaagaggagggagaggaagaggaggaacacctccagggtcaatccagcaggcagcaaatcgacggatcgacgagagagagagaggcggagcggcttcgcggtagaggtgaagatcgcacgagggaggagaggcttcgggagagggagccggagagcgtacggcacggaggaggataggcttcgggagagggaggcggagagcacagggcggcggcgcgaggcgtggaaggaggcagcagagtactaggtcatcacgggagaggggttttgcgttgagcctcctggcaggtgggcctagtgggctgcagactcatgaagagaggaggtgggggttaagggctgctgcagggtggcccaatatcatgtattgttttctctttttaacaaaaatgattaagcacgattaatcacgcttaagcattttcaccaccataccgctcgctcagcgcttagtgctttcttgaatcttgctggtagaaagagatgagaatatcttcacttttttcgttcatcagcttgtgtaaatctacatcgcctaatcaatgtactagctagtactttgaacattgtttaagcctgcataaagatttccacaaccaaacaggggaaacactacagttatagtgcaaccacaattatgaacttgcacaatcataaccaagcttcataatgactgaatctacacatcttatctatttgcttttagtcaaatccttccctgcaaatagtagtacctcttagcttttagtaaaatcctttacattatctaatacacacagtatgcttgttcttatctatcttgcaagtagttcaacatgagcgaactgcttatgagagaagacgggataaacaagtggaggagaatataaagaagatgcaagatttgggtctgaacaaatatacttctgttctaaataattctgtctcaccatctgcatcaacaaaggggaaacatgcagcaaacaagataaataatagttcagattcggattcatatgtctctttctatctccttgacgatgatgatcaaggagatactgatgatgacagtgaatattatgagcagccaaaacccctggcaatgaaggtgctccttctatcttcaaagtagtggatgccaaatagttgcattgcatttcaatgtttttaatctggtgtttaatatatgctcatgcttttagattcatcttctttatttcatacctcttaattaatatatggtcttgcttttaaatgcacatgactattttttgtggacagtatcctagaagaggtagaaacacaacccttgcttcaaagaagaagatagaccccaacatggctccaggcattaggttcagcaagagagtgagggcaggtgcacaaccagaggagcaatcttcaaaaaggcttcactctacagagacagatggccacaatgtacaggaaccaacagatggaaatgatcacataccaaacagccctactacacctggacttgctgatcatttcagcagagctgcagaggaagtcatggcatctgctactcatgacagtacaggtgatgctgaaggcaacagtcgtactgcacctggacttgctgatcatttcagcagagctgaagaggaagacatggcatctgctgctcatgacagtacaggtgatgctcaagccaatgtagctagagatgaagaaactgaaggcaagttctattttttcagtcaaataaggcatctcttttgctgatttgcatgaaacaaaacaatttcattattcaataaaagtgaattatattttgtagctcctacatagcgagcaccaaggagacccagggcagcaaccaagggaaaacaactggacatgatgactaaagttatgcaaaggagactgcccatagctgttgaggaaggcaaaaaaaggccacatgaacctgttcaagctgccaagtttgcatcagaggctggcatcattattcgggaaaccatgcctatcctaactcgttggaaagattacaaggacgaccagaaatactacaacagctttgtgtcacagctaaatgtaagtgcattactgattctatggttcacttgtatactgcttaacctgaattgactaactatggaattgtcatatgcataggggcgcttgtccgttaacactgaggacaaggcaacaaaggaagcttgcaccgatatgctacgctctgcggtaaaaaaccagcgttatcggctcaagcagaaatacttcaatggtgtacctgcaaatgagattagcacaacttctcctgtatcttacatgactgatgaacagtggagggcattagttgcaaagtggtctgatccaaagaacatggtatgggtatcttgtcatatattgttctttcactatacgtttgcaaaggatcttcgcatattgaacctatgatctaatctgacatgttcattctcttgtagcaaataagtgaaaagaacaagcagaaccgcagtcaagtcaagtttcatcaggctacgggttctcgctgctatgtggcacacttacatgcatatgtaagtaactattaccttatactactacctgcacttttgcactcaacttctattgcatttgatctgagcaaacttcgctgtgattgtttatccacgaaacagaagcagaagagaaaccgagaagaacccagcttagatcagactgaagaactagatgcggtggacgccttcaagacctgtcataccagctccaaacgtggcctgagtgaaccggcaagagaagcacttgtaagttcatttgtttgctttatttagtgtaattgttatgagatcatatgagggaggttggctgtgggtcgatggaacgaaggggagtgagatcgatgagtgagatcgcctgtcccatcccaggggagttcagatcatagtctattttgtctgccatttgtctgccatcaaatttctgaaatgaaagtaaatatcatagtctattttttgtaggacccgtgcactagaaatgtataggttttagagtctttgttaagcaaatctgctataatttgtaactgttttcacattatttttcatagtctatttatagagtctttcaaatgtatagcttttaatttgccatcaaatgtatagcttttaagcaaatctgctataatttgtaactgctataatctgctataatttgccatcaaatgtatagcttttagagtctgtcagtctatttttcatagtctttgttaatgccttgtaggctataatttgtaactgctataatctgctataatgtgcactagaaatgaaagtcactgttttcacattattgtcagcatcttgctgttgctcattagcattaacatgttactgtttctgtccatgatatttcagtctcatatggaggctttgagggctgaacctattgctgaaggtgagatgccagcatccagtgtgcaccttgtgtcgaaggtgttgtcccagagcagctcacaccaattcctgaaaagcgtcggcatcaaaacatcggcaacctccaaggcatcatcatcaaatcatagtgagcttcgggaacaacttgcagctgaagcgacgactgtcgttcaaggtgaactcgaccagctcaggaagaaatgtgaagaagctgaggaacagcaggcgaggacacaaagggagttggaggagtacaagaagataacagagaagaacaacaaggagatggaggagaccaatgtgctcatcaagaagctcttgtccttgcatggtaactcttcttcgacatgagggctgctagtcagagctgctgtttttggcctgttctttgacatgagggtacccaaaaactctagttgctcgtgggtgtcaacttttgattatatgctgttatgtttgtgcaaactcaactgaaatgtgaagtcaagtggtgatgctgtgaactgagtttagtgttgtccacttagtttgtatgcgcactggaatactagttgtattcatctatggaatatggaattgtgtgctcattcctctgttctagtatattttgcaatttccaattaaattattctctgcacatctgtgaccaaactggtggcatataataaaacatatgccacgtcagctgccactgtactagccacgtcagcgttgacgtcagctgccacgtcactagccacgtcagcactgacgtcatacgcatcagcaccttccaaatggctgttaatgaccaaacaacggctctatctgtgacgataccgtaccatcacagaaaccaaccgtcgcagacgacgaattatgacggaaaagtgccttcctctatgaccacaactgatcgtcatagaatgaattcacttccatgacaacgcggctttcgtcacagaatgtatacacatcgatgacgaaactgggtagtccatcacaacacaacaaatgtgacacgacccctatgaccaaatcgaactcgtcacaaattcgtcacaaacctttatctgtgacgatatatacacatgcagtgatgcaatacgaacgtcatcgatgataagatctctactagtgcgttcttcaccaacatcatccatcgcttcggggtcccgaactccatcatcaccgacaacggcacctagttcaccgacagaaagttcctggacttctgcgaggatcaccacatccgggtggactgggccgccgtggctcatcccatgacgaatgggcaggtagagcgtgccaacggcatgattctacaagggcttaagccttggatctacaacgacctcaacaagttcggcaagcggtggatgaaggaactcccctcggtggtctggagtctgaggacgacgccgagccgagccacgggcttcacgccgttctttctagtctatggggccgaagccatcttgcccacagacttagaatacggttccccgaggacgagggcctacaccgaccaaagcaaccaagctagccgagaagactcgctggaccagctggaggaggctcgggacaaggccttactacactcggcgcggtaccagcagtccctgcgacgctaccacgcccgaggggtccggtctcgagacctccaggtgggcgacctggtgcttcggctgcgacaagacgcccgagggcggcacaagctcacgcccccctgggaggggccgttcgtcatcgccaaaattctgaagcctggaacgtacaagctggccaacagtcaaggcgaggtctacagcaacgcttggaacatccaacatctacgtcgcttctacccttaagatgttttcaagttgttcatatacctcgcacccacgcaaagtttagtcgtcaaggaagggtcggcctcgccccggcaaagcccgaccctccctcgggggctaaaaggggggggaaccccctctgcgtcgaaattttcctcgaaaaaatatcttttctgccagaatgtctttcgtgctttttggctacttcgaaagcggaccctgaaaacgacggagtacacgtaagcagccaaggctgaccgagccgagggactcctacgcctccgggatacggatacctcactcatcaccttctgcgataagtaactcgcgttcggataagtgattccgcggaccgaacaagtcttctcgtttggaagctcttctgccggagcgattcttcgagccttcccgactgcgtcggtaacagaaccccaaggacgggtaagagtgcgcgtaagcggcaaggctgaccgagccgagggactcctacgcctctgggatacggatacctcactcatcaccttccgcgagaagcaactctcgctcgcacaaacatttctgttaccaacaaaaagtccagatactcgaagcaagaggaaaagagacgcagctttacaacacgacgagggtgtgttttggcctcggcggccgcaggaaacacacgctacaagacaatccgatcctgcaggctcgggtcttaacgctggaagggagcagcagcaccctcggcatcgacaacgccttcggcgaggtccgacttagcctcggacggcgacgcggtccgaggatctccactctgaaggatgacgtcatcgccacgcccgggccatcgctgccagggtcttctcgggaatccggcccgagcaggcggctcggccggtcaccccggggcctcggccagctgtcctccaaggacgtcagcccgaccgaggcctcggctggtcaatttcggcgtcggtcccgctaacggacgacccggccaggctccggccaaccaggttttcttttcgagccaactctgcctctgttcatgttgacaccgctacccctggcctcggctcatcggagagcggccgaggggttcctttaaccaagctagagaagcctcgggcaacaaggccgaccgagccgagggactcctacgcctccgggatacggatacctcactcgtcacctttacacggggcgactcacgcttggtgaagcggtttagacaaccaacaggtgagtcttagtgctcaaaaatgaggaaaaaacacggctccgtgccgaaaaatacatacatgttcaggccccgacagccacaatgaacaaaaacactggcattcaaagtgccattacaaacggaactccgattccacctccgcaggtacgaaaaaccccactcgacgggggggggcctgcggagcaacggaagaccgacgaacggcgcgacgtcgcccgctccggcagcggcgacgacgacgacttctgctccggggggccgaacagcggcagcgatgacctcagggcggatgccgctgccaggaggcccccgcccgtgcccaaactcgtgaggcaaggacgggcagaaggccgtagagttggaggtcggctcgtgggcggccctggctatctcgtcggcggaagaacctcttccagctaccgtggcggaagccggcgccgagagcggctccgaagccactcgggtccgagagccaggcacgctgcagctaccggcgccacggacgacaaccgtccttccccccgatcactgagggaaggagcgggccatcgcccacgtgggggctgaccccaactcggcacactcccctccccagccctggtgatgaaaatccttgaggctgagggaggggcagaggccgcagcccggctcgctttcctccaccatcaaactggaggtcaccgtcttgggtgaccgccggcggggggtgcagccgggctgcatgatgaaaatccttgaagccgaacgatggcagaaaggtaccaactcccacggagttgcgttcctccaacgatgaggcggaaagacggtggatatcccccatccgggggcttggaaggtggaaagacacgatgcataagggagcgcgaagacgtggtcgccttctaagggggtcaccctccttttaaaggcgactctccctgcttgcgtccccagccgtcgcgggctgagtcttctccaacacgctccaaggtcctccccctatggcgcgggggctgggtcccacacgtcatgcaagccgactcagagcagaagaagccaaaccgccgtgcgcggtgcgtacaaccacccagtggttacaagcgactctccgcttttgcccagacccacgggcgaaaggggcgggcagccatgcaggcggcatgcaaccgcgccaagtgggcgcacttctccgactcccaacacgcccagcatggaggcccaggcccacgcgtcatgcaaccggcgcgccgaatgcttcgtgcatgcaacagcaccgccacttgcgccactaccgcgcctcctcgactgcggaaccaataccgcgactcgaggcgacccagcgcacgacccagcagcgccagcctggcgcggcggtcaatgcggccaaaaatgggccggcagtaatggcgatggcaggcgggcaggagcagcggccacgtcgtcagccaagctcacatcccgtccgggggcagcgagagaacccactctcacggcgtgaagacaatgcgcccgtgatccattcctcgaacggctcgcgcacgtgcaacggccgccccgccaaccactcgccccgtcgcattaactccgcggcgggacaggcggcgcctctggcaggagaagcgggcgacgcttcgccttcgccataatgaccgcgtcaaaaaaggtacgccgcgtcgttcgatttcatatccttttccttttttcctctttctctctcttgcaacagggaccgagaaagggggataccccgaaaaggatccttccccgtgaaggaaccaggctccgagcctccctactgatcagaggttcgaaggctggcccctcggaagggttcgacagccgcctcagatcgcgtgggctctacacccactactggtcagaggttcgaaggccggcccctcggaagggttcaacggccgcctcaggctactcgggctccgcgcccactactgatcaggggttcgaaggctggcccccgaagggttcacagccgcctcagacgccgagcgagggatgaccatgggtacgttcgatacataaccaaggctcgggctgcgctcccgaggtaccctaggacatttccgagaccagcgggaacggtcttgtaacggaatcccatcagagggaggcatcgagccctcggaccccgtcgccaggggaccgggtccggcagatcacccgcaggtacttttgggcgtgcctctgggcccctagccgacccctaacgaacggggcacggacgtccactcggattacccgcttgcagctcaccagagacaccatgttcggcgcccatcgagggcaacatggcgctttcccccctcctccttgcggaaaggcgacgcaggggcgtatgtaaaaaagccgagtgtgtccctgatcgccctctcgccctgtgcagaggctcgggggctgctctcgcaaacccggctccggtcgaaccgttgacagcatcaacataccagcccgagaacttgggaaccgaccgtacacccgggctatagccagctcgcatgagggaacaaccagaccagccgaagcattacgcgaggcattaagacctcggaggagtgaaaccactcctccgaggcctcgggggctacacccggcgggtgcgctcgcgcgcacccaccggtacaaaacgcaaccgagaaaggctggtccccttgcaaaaaagtgcgacaaaagcctccaagcgagtgctaacactccctttgaggctcgggggctactgtcggggaccataattaggggtaccctcaaggctcctaattctcagctagtaacccccatcagcataaaactgcaaaggcctgatgggtgcgattaagtcaggaatcggtccatacgagggactcgatcacgcctcgcccgagcctggcctcggacaagggcagccgacctcggaggatctccgtctcacccgaggcccccctccagcggcgaacgtgttcccagctcgcccgaggccctgtctttgccaagaagcaaccctgaccaaatcgccgcgccgaccgaccaagccgcaggagcatttaatgcaaaggtggcctgacacctttatcctgacgcacgcctcccagccgacagagccgaagtgactgccgtcacttcgccgctccactgaccggcctgacaggaagacagcgccgcctgcgccgctccgactgcggtgccactcgacagagtgaggctgacaggcagtcaggcccggtcaaaggcaccataggaaactccgctccgcccgacccagggctcggactcgggctaagtcccggaagacggcgaactccgctccgcccgacccagggctcggactcgggctaagtcccagaagacggcgaactccgcccgacccagggctcggactcgggctaaagtcccggaagacggtgaactccgctccgcccgacccagggctcggactcgggctaaagtcccggaagacggtgaactccgctccgcccgacccagggctcggactcgggctcagccccagaagacgacgaactccacgccgcccgacccagggctcggacttgggctcagccccagaagacgacgaactccgctccgcccgacccagggctcggactcgggctaaagtcccggaagacgacgaactccgctccgcccgacccagggctcggactcgggctaaagtcccggaagacagcgaactccgctccgcccgacccagggctcggactcaggctcagccccagaagacgacgaactccgcgccgcccgacccagggcttggactttggctcagtcctagaagacgacgaactccgctccacccgaccccagggctcggactacgccccgacctcagccgacggtctccgcctcgcccgacccaggggctcggactcgacctcggccacggaagacagactcgacctcggcttcggaggagcttccacatcgcccaacctagggcgcagaccagccacgtcaacaggaggcgccatcatcaccctgccccgagctgactcgggccacagggaacaagaccggtgtcccatctggctcgctccgccagataggcaatgatggcgccccgcatactctgtgacgacggcggctctcagcccccttacggaagcaagaggacgtcagcaaggactcaaccgctccgccagctgtccctccgtcaggctccagcactcctccgacggccacgacatcacatcagcagggtgccaaaatctctccggctgccacgacagcatgtacttagggcgctagctctcctccgctagacacgtagcactctgctataccccccgttgtacacctgggtcctctccttacgcctataaaaggaaggaccagggccctcttagagagggttggccacgcggggacgaggacgagacacgcgctcgcttgaagccgctcgctccctctcccgcgtggatgcttgtaaccccctactgcaagcgcacccgacctgggcgcgggacgaacacgaaggccgcgggattcccacctctctcacgccgatctctggccgcctcgctctccccccttcgcgctcgccctcgcgctcgacccatctgggctagggcacgcggcgacgttcactcgtcggctcagggaccccccggtcttggaacgccgacaatactgatactaattatgttacatggtgtacgtatttatgcaattcggtacactatgtaaaaattttttcctgctctatgcacacaaatttaggatgacaggaatgtgatgaaaggaaattgtcacacccggttctgggggcaaaaccgaatgcatagcgtatgtgtgccaagatccatttctacacatatgttgacgtcacaagtgtaatatatcaaaagacaatacaataaaggcgtaaagagagtagagtactgtattatatcatcttaatcattgtatctttaacatgtatcaacatcaaagtaaggcggaataaaatatgggtaatctcccacaggaagatgaccggcgcatcgttagactcagtattcatcgaaatttccatcaatgtcttcttcatcaccctctaatcaaaatattagcaagggtgagctcacttatggccggggctcagcaagtggggaaaaaattaatgcaagtttaataaggtgaggctaaggttgagcagtaagcattttagttggtcaatattttattagcaacgcctgtcttactaataagtgtgtatcccaagtatcccatttaaacaaaggtataagagtatatcaaaagcacttaagtgaaaccacttaagcaaaccattggcagatcaacagatctcgatttattgtccatctttaggttcaattatcatgtgagggtccaggttgctcttgaccgtgaccacggctgacatatcagttttacactctgtagaggtggtacaactttacccacaagccatatatcccatctagtctgggttgatcggacccgtaaacactgccgaggtgaatggctagggatccattatgaggctttcacaaaatacacttaatacaaagcaacccgctaaggtttccaagtcggtatggaggccctctgggtgaggtaccttagccaagaatacgtccccttgttaacgtgagttgctgccactgtcgctccccctcttgcccataattcaggtaaggttgctaggtactaagcatataaagctaattatcaaagccagagctatgatagcactcgtggttgcactgttatcctgggtcactccatgtttcaattaatatgaaataatcttgtttaaccatcgggttaacaccataatgccaatttcatttccggaacattaatatcaaataatgagtgacatcaaaattatcaagttgagaggtagaacaaattttgcaaagcatagtattttccgagggtaatcaaggaattcagttggtaaatctaggaaatccttagttaggcaaatcccatcaaattatgcaatatatcaaaaaaataaacattattatatgcattagttgggtacaaatagaatatgcagagggaaaatccacttgccttgctcaaaagtttcctgtgggtcgtcctcgaacgtgtttggctcgtctacctcacagtccacttctagcatcgatttgcgtatcgcacatataaaagaatacatacgccaaataaataaacatacaccaacacaggggtaatcattcaccattacattcacattcatacatcacacttatcacactcataattacgttttaaagcgtaaatacttataattcattatgactattactgcgagtcattattgatgaaattatgagtaggtggctataatgctagttctaaataacattctttaagaaaataaatgctaattattttctttattactaataataaactaataaattttattccttttattactaagcagaacttatgtgtatagctaaaaatggtttattcatgactctactaacattaatattctaagaatcaataaaaatcatcaattgggctttttataacataaacatggttattttgacataaataagttagaagttaagtgctattcttatggacacctttattttggctagtaaaaatctattttcattatgactaggggtattcttttagtatttttctttctttctaaaagaaggtattattaataataatcggagataaatcatctattaacttataatatttatattgccatgaattctataccatgtactagttccatgttaagaaaagcttctattatctattaaaatgaacttatgattataaccttccaaataatttccaaaattcattgtgaacaaaattaactataaaattacctatctagtgtatttatcaccaacatgtgtctatccatttttgtcatacttctctctaatccaactttctaaaagtcatcgtaaacaaataacatgaataatcacggtgcactaatttatcgcatatatctaccaaaaatccatagcgcacatacgtatgaattccgaatcacaacatgctcatattacaacataataattacatgaattcataaactaattcaaaaagtgatttctaaaatatacaaaattatattttgggtcgtcttcaaccttgagcttgctcgtgtaaccggaaagagatcgttgggggttcggtcgagtggagaagagcatgggctcggcgtcggacggctcgggcggtctacgaagctccggcgatggtgtgggcgaactctggcgacggcggcggtggctcgaacggcgaggagagtgagagggagaagggggcaagctcaggtagggaggagcaagggctcggtgtcggttttatagaggagaagggagagaggaagagacgccagggagagagagaggcggtcggtcggtgcttcaaggccattgatggcgtcgacatcaatggaggggagagtggggaggagaaacggtcgatttgatgctccttaattcgagaggaagaacggatgcggggcacggctcgatcgcggtgcttcggccgtggtcggggcaccggggcggctcggcgacctgggtgcagggcgcgaccggggtcgggtcctggcgcggtcgggcgtcggggctgggcgcggctcgacggcatgtcggctgtgcagtcgggggaggggagggagaagaagagaaggggtcgggtggggcccgcgcgcaagagagagaaggggaggagaagaaggagggtggcggcggcggctggggagccaaggagaggtgcgacggcttgttaatgggcccctagtgggccattagggttaggttagggttttttatttcaaaatatatttttaaataaccctaaaattcataataattaaaccaaaattatttataaataaaatatttatttttggcctaataattattatattatttatttgaatttttatttaagaagaaatgctattaaatatccaaaatcaatcatgagcaatcaaaaattatttcaaatgcaaataagtaacaaacagttgaatgaaaaatttattaccataattaccattaataactaaatgcattatttttagttgatggtttttatagtgttacataaatggattggcatgcatgaaaacaaaaaaacttatttaaaatgatttatttcctccataaatgtaggatcactccaacaaccatgtagttagtctcattagaacccgtttatgatatatactgatattaattatgctacacattgtaggtatttatgcaatacggtacgctgcgtaaaaatatgacatgcgattcactggtaaacgcatctccatgttcgagtgtaaaaaccttcagttttgagtgtaaaaactcgcagttatgagcataaatactgatcaacatgaaagttgttgaaaacctcttgatgttggcataaatatgtatacaaagtgacataaaaatgtgtatgtgattgtatgtcatccctccactaggaacatgtattcaggcgtgtcccctaccatacgcacgcatgcagtcctatttttatggcagatctggaaaatacggcaatcattaggcacatgcatgtgattcctatttttatgcagatccgaaattatgacatgtcatcggagtttccattgcatgcacacaaattttgaatggcattttcgttcccactgcatacacacaaaaattggatggctgatatcgtgcaaagcataaatcattatttaaatttgcataaacacctacaacgtacatcataattaatgaaaaaactaagtatgggctcaaccaacggttgcatgcataaacaaagaattggaggaggtcgtcgtcgaaggacgccgccgaggcctccggattggaggagctggtcaccaaaggatgcccgaaccgtcgtgcataccaccgaccctcgcagcccatgccacgcgcgaccgtcatcgccaccgtagctacccgtgcttagcgaggcaaccgcctccgcttgctcgttggggtcatcgtcgctcgcccgccccataaaacaatgttcataactggtacaatgttcataacatacaacataaaacaatgttcatagcatacatacaatataaaaccaacatagtttatagcattcttcacatcatagttcacaacgtagaactcacaatcactccatagttcagaactcacagtccgcattcactacattgttcacatcattcaacacccacacaacatcatctagctataatcatcaacaaaagttgaaacaaaggtttagctttagattgctctaatgtcatgaatatctaacgagcttcccaatcttgtttcagtagttgataacaaggtgaagtactttgcctgtgaaaccacgctccataagttttttagtacacttctccatattcattggaccattgaaaatatcatatgctattttgttgtcttcttgtagaaacctagaaaattgttgaccaatgtttgatttcgtgttggaactactaggtgtgtgggacatcttatgtccgttggcggagcagttgaggtgacttcaattggagaacctaggataacgttaggctcgacataatggaacacatctagccatgtactcacattctctttaagttgtttttccttcctacactaaaaatgacaattgaaaaaggtccaaagatgaaaataagtttcatattacaatatggatgccactattaccttatgatctttgtctctctttttcatttgatcaattgagctcttaattcgtctgtagtcatggtgtttgctcatttataagtttttaaccattctagtaaagtaatatcagtagttctccatgactcatatccatcacaatgaaacttctaactacagagaccaagacatagtctcctttcgaggtccatcagttcactgcagaggattgacacaatcattggctcaagggcaggtgtgcgtgtccaatgtcagacgaccgagttcggtggtgcctgggtgcggatcggtgttgagacacacaacttgtggcagagcaagaacccaaagagacatgttctatttggcatttcgatttcacttactagacgattgaaaatgtatgggattaaaaagataaaaataatgagatatttcactaaacaatgtgtacgatagattgatctaaaatgaaagaagcatttcacttaataatatgtatgtcacattttcaaaatatttgttgttaaattaagccataaaccctaaaccctagtttattacattgattttatcttgaaactagtgtttccatggtctataatataatgtgtgtgttatggacaaatattacatagaaatccaaagacaaccccctggatgatatatcacagtaatctgaagtcattagcaaccttaccagcagcaatccttaggcgaagccggttgcttggagtcattgcgggaaggcagctgcttggtgtccatggcgaaggcgaggaaggcgactacgctacggaagatcgataagggtgcagggaaggctctaggtgaggaacggatgcgggagcacaacaacgccgcaggagagtggtggcatcgtgtctatggataaaggtgatgcaggaggttctctagcggcgtgatatctggttcgggtctgcatggatggtaggagatatatatggtgcatattagtatcaattcttatgcaaaccttgtactaaagctcagtctttaataccgatccttgtttaaaactagcactaaagactaagtttgagtaccagttctaaaagaaccggtgctaaactaatattggcacaaattctaattgcgccggtaggaaagtaaaatcacttttagtacaggttgtatataataacccgtgtactaaaagcctctcaggtttatgaaccggtattaaaggtttttaatcggctcgtggattgaaccagtacctcatattagcactggttgggaacaaaagccagtactaatttcttttgtatcgatctccacatttaaaacaggcacggaagctggtgtcaataccggttttaaataactgaaataaaagttgttagaccaaaaccctattctccggtattctcatttgcgtctcgcgcgcattttttacattacattattattacaggactatacagattggtggatcaattttttatcctccgtacgtccatgtgcaagacagactgtaatataacttgaataatgtacatgatgctcctataaatagccaggagctaagcctagctaggagggttcgttgtcgccgtcgaccagcaaaagctagctagctagagaggcgaagtaactttgaagcaagcagtaaattaacccaccttattatcagttctttaccgattaattcttcagctagtttcatccctagcttaattaatttttccccttcgagctagcaatggccatccaaaagccatacaatacaacaacatgagcacggtggctctaacggtactagtcctacttgtagcctgcagtcaagtcatatcagctcattccctagtactgcagcggtcgtcgtcagctaccacgaaagcagcagccgcagggatgatggagggcacgatcattccttaatggggtgttggtttgagaaatgaggtagtccatatcttctcacttctcacttttttgtttggtttgtggaatagagtgagttaatccatcaccaccttattcatcatagttagttgtttagtactaatatgtgtaatggagtcatctcaccaaatttgagaaatggactcatgatgcaccacttcattttggatagagtgattcatcaaaccaaacacctcataatttcgtctgcttgttaccctaggtatatgtatgattagatatatgcatgagtttggcatcattctcgatctctgtcctcttcgctttagggggtgtttggttacaccccgctaaaatttagcccctgtcccatcgaatgtttgaacctccgttccgggtattaaatgcacatctacaccagcagcaccttctccagcccaggcaccatcttccccagtccaggcgccaccccttccacctgggccagtgactcgggcccgtgcaagagaattgaactacatcatgctgttaaagaacgaaggcccggaagaatagacgaccagcccaactgcggcccataatgcacgacctagggttggccgcccctaggggctgcgccccctctctatttatccaggagctgcgcctcctttatttctagagttttgttttacgttagctttagctactctcgaacacgcgcaaatctgcgctgtcttcgtgtattcagaactccaccctcgagtaatagattagattgctcgcatctttttcttgttcgttcttcgattgcgcacaggaaatgatcttcgtgatcaggccgatctcgcatcagcaaggtcggtaaccacaggaagttggttcagcgattgcattggcgcctcgggcttgctcgtcgtagtcggatcgcaagggtcatcttccgccaaatcggaattatctctactcgccgaaagatcgggcacctcagctacatcaattggtatcagatttccaggttgatcggtgagtttatcgagtgttttttttcctacagtccacaaaaccacataaaaattcaggttagaccttatcccagcacccttttgagcctcgcactttctttcaataatctgcattgttgaatttgtgtgctttcgcgtcatttgttgctggttgcattgtgttcttccaccattcaaaccctagcgccgccaccatctcccctttgatcacgccacaaaccgagtcaacattgtttccttgtttttctccttcggttacgtcaaaaaaaacagaaaaaacaaaccgagtcaacggccgtttccttgtttttctccttcggttacgaaaaaaaaacagaaaaaaaaacaaactgagtcaacatcgtttccttgtttttctccttcggttacgtcaaaaaaaacagaacaaaaaacaacgaaggagaaaggatatagttgtttcatcccggtcgtttgaaaacataacttgaggtaccttccttaaaccgggcataacttttcgctcgggtgtccaaaaaatctgaaatttttacaggagctagttgacaccattctgaggccggccaaactcacctttggtctgtttgggttcgtcaaaattgtcaaaaaaaattcaggaaaataaagaaaaaaatccgtcaaagttctcgcacgcttttcagagaacttcctgattttctgtagaccacatctgatctctgttttaggtgaaacttcgtctagctcctattttgttgcttcttgtgctgagaaaaatatcaaaaaatcatacaaaaaagaaaaacaaaatcacttgtgattcctactagtggcctcgctagtacaatatttacggtactgccattctgctagttccatccgtcctttgcacttgtggccagcaatatagtttcgtgttctgcactataattcaactttgcattattgtttgattgtgctaatcattgacttgagtgcagcctacccagaactccacatatttctacgacgagcaggcttctgtttctccaggcaatcgctcatccaatctttcaccggttccacctgttggttgcagttcaccactgtggcttggtaagaacggataagaatttgacaacagcactagtgtgagcgccttgtgagcagtacacccctgtttttgtcgttgttttttttcttcttcttttggtgttttggtgtttgcgctaactatggcaggagcacacgacacggtggatgcccagttgctggaagtaaggggacaagttgatggacttgctgatgacattaggacgatgcatgaacggcttgattcaacggtcacttcgacgaccgagcgtttcaaccagcttgaccttgctcaaacggcgactcgcaccacactcgacaccatcctggcacgccttgatgcgttgaccacaaagatggagcaggactacggcggtgacactgagtgggaagatcatccccctaatgacttattttctaagattaaatttaaaattccaccttttaatggcaaatatgatcctgctgcatatcttgattgggagttagaggttgaacaaaaattttcatgccatgatattgctgcacattctcaggttaaagctgctattagtgaatttactgattttgcattaatttggtggcgtgagtttaaaataaaacatcccactaccattccaaccacttgggatcagttgaaagctgcgatgcgacatcgatttgtgccttcgtattatgctcgtgatttgcttaataaaatgcagcgttttcagcaaggttctcaatctgttgaggactatttccaggagttacaaaaaggtatgattcgttgtggcatattagaggacaacgacgctgctatggcacgttttcgtggtggtttaaaccgcgaaatccaagatatacttgattataaggaatattatgatatgactactttatttgaatatgcttgcaaagctgaacgtgaagtgcagggacgccgctcgaagccatattctaacccttttgcaggacgaagctcgacatccacctcagcaccagttccccctgcgccatccacgtccaccactactccacgcgagaagacgaccaaaccagccagcactgccccacccacaggtcgtacacgggatattcagtgtcatcgctgtagaggatttggccatgtgattcgggactgcccaaacaagcgcactttgctcattcgtgacgatggtgagtactcttccgctagtgattctgaagaaattgaacatgcactacttgccactgaccatgcagctaaggtggaggtacatgtcaacccgggcgacgctgataggtatgaaagtcttgttgtgcagcgtgttctcagtacacaggtcgctttgcccgagaagaatcagcgacacactctgttccatacaaagggtgttgtgcaggagcggtcaattcgcatcattatcgacagcggcagttgcaacaatttggcgagtaccatgctggtcgaaaagttatcgttacccactcgtaagcatccaaacccatatcacattcaatggcttaatgatggtggtaaaataaaaatcacacgttccgtgcgcgttcctttctccatgggtgcttattctgattttgttgattgtgatgttattcccatggaagcatgctctttgttacttggtcgaccttggcaatatgatactgatagcttgcatcatggtcgttcgaatcattattctttcatttttaagggtcagaaaataattatacatccaatgacacctgaacaaattgttaaagatgatcttgcccgagctgctataactgctaaacaacttgatccatcgccctctgttccttctgaaatcaagttgaaggctcctgttttacttgctatgctacacgtgctgattttgatgatctacacggtgctcatttgccatgctatgcacttatatgctctagtgtcctcatttcacttgatgatgcaccatctttggctattccccctatggttgctaaccttttgcaggagtacactgatgtctttcccaaagacttaccaccgggtctcccaccacttcgtggcattgagcaccagatcgacctcattcccggcgcacagcttccgaaccgcgcaccgtaccgtacaaatccggatgagacgaaggagattcagcgccaggtacaggcgttgcttgacaagggatacattcgtgagtctcttagcccttgctctgttcctgtgttacttgttcccaagaaagatgggtcatggcgtatgtgtgtagactgtcgtgctattaataacatcactattcgttatcgatatcctataccacgccttgatgatatgctagatgagcttagtggtgccattattttcactaagattgatttgcgtagtggttaccaccagattagaatgaaactgggtgatgaatggaaaacggcttttaaaacgaaatttggtttatatgaatggttggttatgccgtttggattgactaatgctcccagcacttttatgcgagtgatgaatgaagttctaaggcccttcataggattgtttgtggttgtttattttgatgatattcttatttacagcaaatctaagaaagagcatttggaacatttaagtgttgtttttgatgcattgcgtgctgcccagttatttgctaacatggaaaaatgcatcttttgtacacgacgtgtctcgtttcttggttatgttgttactccacagggcattgaggtggatagcagcaagattgctgccattcgggagtggcctacaccgacgacggtcacacaaattcggagctttcttggacttgccggtttctaccgcagatttgttcgtgattttagctccattgcagcgcctctacatgagcttacaaagaaagatgtgtcatttgcttggagtgattcctaggaggaagcgttcagcactttgaaagataagttaacccaagctcccctattgcaattgcctgattttaataaggtgtttgagcttgaatgcgatgctagcggtattgggctaggtgctgttttgttacaagaaggaaaaccagttgcttattttagtgaaaaattaagcggtgctagtctgaaatattctacttatgataaggagtcggattataaaactaatttgtcagccgaagattaaaagacgagacgaatctagtccagttggttgggtctatatttcatacttctatttaaaagtcaaacgcttgatgtgacccgggctaaactttagcaggagcaaccaaacacccccttaatttgctaattccgcatacacctagacgggactagcttgcatttgtttgccatatatatattatttgtttttttttctagtccgatgattgcatatactaattcttaaagaaagtacagagttgaatgcctgcgcccaatatgaagggatccctatatgaattagtaagcagagatagagggaaagcagctttctttcctttaaaaaaacgaactaattaaggatccactagataatagcaacagtccaaggctccaacaagtagaaaactgaatactgactgaatgcgaggcacatgcgtgcgtactgcgaggtgttgtcgccatatcgagcgtgtattcctcctccctttgtcttgggaactagctctccctacaaaagtacgtgatagctaggtacattccttttagggggtgtttggttaccccaaactaaactttagcccctatcacatcgaatgtttgaacctccgttccgggtattaaatatagtcggattataaaactaatttgtcagccgaagattaaaagacgagacgaatctagtccagttggttgggtctatattgcatactcctatttgaaagtcaaacgcttgatgtgacccgtgctaaactttagcaggggcaaccaaacaccccctatattaggtaaagatgtttcctgctgggtgtaccctcgcgtataatgttgtattgcatttccacttacggttgtgtcttgtgaacgaactgaaacctatcgtcgatgtttccagctgtacaaggcgaagagctaccctctctatgttttgtccaaatcatgtaatccttcacaaatcctcgacataccagatgagatattatttgttctctatcatcaaatacaacaacctttttgcagtccatacatggacaatatatatactttgtctttgttctctaagcatagttcgtagcgacattaataaacctatgaacctcggatatgtatgatcgatctagccttgataagttatacatctagggtgccctcgccatcatcacctgtaaaaaagtaacataaacacacaaggaacacaaattgcactagtacagagaagttctatagtggcggttgtaaaccaatttatagtggcgttttttgtaaccgccagtgctaggggccagtagaaatcatcatttttacaggcgggtaactgaggaccgccagtgaaaatcgattttcactggcggtcggcgtaataaaaccgccagtgaaaatcgattttcactggcggtcgacgtaataaaaccgccagtgcaaatcgtttccaggaaacataaaacatattttaaaaatagttaaaaaatttatttttattaggggggcctcagcccaccccacccgcccgtctccgtcgaagtcgcaagtcgcggcatttttcgcgcaaaattcgcgcgctacgcggttgttagtattcgaaccgtcgacctcaccctcgcgcgtaccctagtttatcttgtgtctagtttgtagttgttttctccacatattacaaccatttgagtgtaaattgcttatttgagaccctaaacgaattcaaataaaaaagttgtcaactacaaagataaataacttttgaagttctacaacttttattttgacacttttttcatctgaggtagtttgcaaaatttgaattttaaatttgacatacttagattcaatttttgagaaccgaaatgagttcaaataaaaaagttgtcaactacaaagtttcataacttttagagatcaacaacttttattttggtggttttgtcatacgaggccgtttgaaaaactcgaaaaattaaggataaaaatgatttctagtggcggttccttaaaaaaaccgccactacaaatcatggatttctactggcggttttcttaaggaaccgccagtagaaatacgatttctagtggcgttttttttaaggaaccgccactagaaataacacagtcggtggataaccgaatccgcctgtaaaaatatattgtccccgcaggctttgagcctttttgtactagtgttggcaagagaaatatgagcttaaaagtttgccaaaaactacaactgcttaggcgaagggtttttgactttctcacggtctctttctatagaagcgttttcaatacccaccacagctttttcaaaagacatagcttaaccaaacataatctacttatagatcatgcatgcatgcgtgtgtttggtacggctccatgttaccaataaagtcattttgttcttaagcttcgttcatgaaaactcaatcgatatagataaagttgtttatcataatatagtttctcataataagaagaaataaataatataaccgtaatgccgttcgtttttttctctccattcaattctttcacagggcaagggcatgggcagcaccgtgcatccatgttactcaagtactacaagtcgccagtttgcttactttttaggtccctttttaatttcctattcgaccgatctgtgtgataaacaatttaccggttaattttaccactttggccctcaaacaaactggctaataaattgactaattgttagtcgggggctagcaaactgtttgcccattagtcaattgaccttgttaatatataggtgctaatagaacgtataaagagaaaagacatatatattagcaaagactccaaacataccctggctaattgttgctagcaaactatttaccgggtaattgttagccactggcaaataattagccgcgaggatcaaacatggtcttagtcgtcgttattattcctttaattaattttactagaggcacacacacaaatgtgagggtcatatcctaatttaattaccattaacttcttatccatcttatacaacctaccaccctgccttaggttatcaaccgtagctttgcacctgtttaaattacatatgagtggaacatcctcagtccacatcatgtcagaaacccttatataaaaaagtttggaaatagtagataacacaaccatgaagggacgcctaaacgcaagatcatcatcaagctattttgctgcaatcttttttaatgtgaataataagtgtcttgggcttacaaaacccatagaacctctttgatagcgccttaatttctatgatcagcttcttccttcttatcaacatgtggaggaccaaccccaacattgggtaaaccaaagacacaataaaaaagaggaatggtccatttgtacacaaggttgacatttctctttgatatcctaatttaaagtcattctaataagattttgtcgcgcgacactgtcgctcgttctaaagtgtacataaatttgacactagattgaattgtttatgttgaggtgtttttggtgtcccttggggtctgtattgagttttgagagtcaagccatgtgtgttctaggttgagaattttttgtgcctcacattcgtcggatccttcggtcacaaataaatgatgtcactaaataccttgatctctagctttactttgatttgagaaattacttagcagtgttcttttctctagttaactattaaagcatgtccatcgtggattcttataaaaaagagtcatatatctatatgttattatcatgcataaatatataactgatgagtgatgcatggcaactttgtcggcaattaatgtagctgttaacagcattaaggtggtgggtctccgggaatacttttgagttcggggtatactagccaaaagatacaaaattaaccggtaacatacacataaatactaaggacaagcaccgtgttaacgctaacgacaaacacaaatggaggatcaaggctaggattccatatgtcgtactataactgataaatggcagcgagctgtcgtccaacaactctggtcaggctggaacgttccggtgaccttgttcggttagttctcaatccatatgaattgagtgagattaggtggatttaaatcgaaagcaagttaaatctcttcttaattttttccaatctcattcaatccatgtgtaatgtgaataatcgaacaaagccatagtaaaattcattatgtattttcaacatatatactaattaaagttcatccttagggacatatatgatctcatgcatgttcccacatctctagctagctaggtttatatgtcctacatgcacataattaagatgtagtccgtaatttttaacatacgtgttagaaagctagtgcacgagtatatatggcatctggtccttcacctcctcggctcctccatgcatgtccttgtatatagcttgcaaaagagaggagtttagtgttgctatctgattaatccatgtaatcaaatatgacactttgtgcccaccatgcacatgtgccagcaggctaaggtagttatctctactactccttatgtttgtatcgtaggcgtgcacagtccagccggttttgccgtcgcgctccctccgcctccctccgcgctccttccgccctccgcgctagatccctgattcccgtggcttcgccatcatcgccgctcacgcaccttccttcgacaaccttcctttcatgatgcctgttgctccttccaaccttggcacatccttccatctacggcacccactgtgcctccgccctgccgcgcgtgccccgcctcgtagcccccgccggggacctctgcttgggccgcgccaagccaggtgattggctcgtggacctcgaagccgtcgctgcgggagctagcattctacggctgtgggagctagcgtcccgaccgaggtcgtcgccatcagtcaatggccatgcctcgcctccgtgatccccgcatcgcacgccccccgcaccgtcgcaggtttgttactgccgcatccccctcacccccacccaccgccgatttcgtagacctccatgcacgccgcggatttcgccttcctgaagcaccctaagatgtttgcgctgccgccccaaccccacttaccaccccaccgggcacgccatgacagggaggtctgtgcccgctgcccacaccctccgccccaattcacaaaaccctagcgacctcgatttctcaccggcatggtcatcaacacctatctctcagccaccacagccggtggtggctgatgcagttccagtgcgcgctcatggctgcaccgcccatgtcgatccccatcaagaagttgtcctggaagaagagcacccgcatccgctggcctccaccgacgccaccacctcgcctgtgaaccagttctcgttgaggtacacgacagccctgtcactagctgtcttgctcctagatcttagtttattgtggtcgtttatccctagagtttaagaatatgtggatccctgcaaaataattctcgtttgtaatggtttgatctgtagtttctttgtcgtttaagttccacttctttcactgcaagaagatcgcctgttgcttttttggagtagcactgagactgaaattgtcaccctcagttgacttgatccaaaaaatgtgccaaaatgtttcataaaactaggaaagtacttctcatccttatttctataaggtttatgcatgtgactttttcccttgtttcaggtcctagccaaagagcaagttgatgcactatcgaaggaattgtttgcgctttcaaccgtcacaggtattttgagcacactgctggctacttgtgttattgttttgaccaataaaatctataatttatctgaacaaattgatgcaattgtctccctgttctaaaattcaatggtagtcacagatcttagagagctctatatgtttctgttagtatgattgtgttaagtttatatgttctatcttgccactttgctctctagcagatgataattaatatggttgcagttgctgctcatgtctaaagacaatagatgctatcccagtagatgcacatcctatgacacagtttaccacattttcaaaccacattttcaatctgctctctatcttctgaaccggtaactgccttcttcaatatcgaccaccggccggtccacctcttcaataatcgtccttcatcccccttcagttgtgagttgtgacatactatttgtattcgaatctgatctattacaagtatacatggatattatagggtgtgcatctgtatacccatgttccttacaaggtccgtccctaggtgatatgagtagtaagtctaaacttgcttcttaccaagagttaggatgtatgtgtgtatgtattttttagtacaatagtattcaaaatttatgaggaccctttctttttgattgttttgaacaatgggcatatgaaccggtggaagaacaattcgtgcctgcagtgttatctgccacctatctttattatgcttatagagtgggagataacatcccatatgacattgtacctaatcctcagctatttgatagttgtttgtgttttaaggctgcatgggtgtattacagttttggcggtatccattgtttgaacgatgggagtatagaggacttctctgcataaataggtaggtttcccactaatttagtaattttgtctgccacatataaattgcaggatagcagttgacgtgcctttgcagctcatattcactcctatgtgtttgttgtctgggttccttaggtgtttctaggtagggatgcaagttggctagccctcaaacccgcatcgccatcctaattgctctgtcttgaatgtggttaaatggggctactgggatgggattttggtgctcggtgctgctggagctaagcttattgtccaaatccagaattataggaagatgaaactttgttgtcaatttcaaatttattttttctatggatgtgtctgtctggaattacctaactttgcaacctgcaatcgataggtatcgacaatgagacggatcgtcgggaccagcgaagccccgcgacgacgtagcaaccagagccctcccgcgagacgattcccaaagttaggtgtgtgacttattccattatttgtaccacatgattgtcagacatattaacagcacaagattgacaagaacactcatgtattttccagtaaatcatcttgattaccttggtgtacaagttgcatgggtcactggtccatggttcctatctattttagtatttttatgaacatgcttccctgggaaagtggtgagccttattctgtattatttgaaacatctacattttcctttttgaaatgatgtttctctgcttgacttattttgtgttatttgaaacatttaccttttccttttcgaaatgatgttcctctgcttttgcaatataagataagtttattgagaaatgtatttcaaacagtagggccttttaagagaccatggttgcttttgcaatactgtaaagtgacacttaccctgagtagttgtagtgtaaggtctattgtcattaactattttttatagctaatgtttacttggtctttgtgcaagtatgcttggactaatattctgtttcttgagtagactataagctattatcttctctagaaacaagataagtcattatactgtaaagtgtaaggtctattctgtttgttgagtctggttgtatcattgcggtcataagttattttggagataactttggttgcagatgatccgttcagcatgtcctccctatttggagtcccttggcacacttattttttcctaaaattctcaggagtccttatctattgggaattatggatggagggagtagtatcttgggttgatgagaatactatggttgttcctgttccataaattttgttgcattgtggtgagagtttgagaatgttcttctatgtttgttctcttaaactagatgttaacatatattaactatttggttttaggagtagttgttggagtaaaaagatgttgggtcctaatccctagaaatcagttcctaattttttaggccccaattatagaagtccctcttggaaatgctctaaggagaagggttttgaggcaatgatttatattatctcccttgatgtttttaattattctgtggccttgacagttaagaaaaataatcaatactcaatgaagatggacgacgtgagtataatggtgacgacaaaattgcaataacagttattggaatcgtaccctgactcgagcaaaattgaatccaaaatcatcacaatgatactaaatggggttgtacgagggaattaaacgaacaccacacatcaaactatggaatcttcagatttaaggtaccagctgaaatcacaacattgcatatagtgacatgaattcaaaacatagctaaggcagtgtccaattcttggtaaactagatgtaaaatctactggttgatatcagccttcttctgccacagcctgtccaaggagctgtctgcgtcgccctgtgcacaacaaaatatggaatcagaatctaccactatacaacggacaaccaaacatagcaaaccaggtaactgggcaatccactagactaacatataaaccaggacaataaaaaaattgttggctagctgtctaggtgcaatgtcacaatggatttagatgcgtctgaagtctgaacacatacatgtaataaaatttgattcctggtaaaactattaccaactcttaatttgaacaaatatatatatatatatatatatatatatatatatatatatatatatatatataaacacagcctaaatcctaggctaggaattaaccaatgtgaagccatataaatccaacaggcatcgatggaaggtgcatcccgcagtccccacctccgcacatcaggcccaacccgcatccttgacgaaaactttcattcacctcccatggatgcgccaacctaccatcgacgtcgaggatgccggggctttaagatgtccaaacagatgctccaccccattccaaatcctccccagacagcaactgcaacttcgacctgattctggtacatcttctctactactcatacctgagtatgtacctgttactactcatacatgttagtatctactactcagtcagttcgtgcacacatccataatttcaatcgcagccgggtactttcctacttacaatacaattattatgtttgggtaatcagttttattctttaattttgattttgattttggctagatgttttggtaaccagacatagcatagcttcagtgacttaatttcttcccctctaaaacacatggctatgatattcggatatttttattactattgcacccaagtaatactaagtttctcttataagatatatactgatgcaagtcagtaagtcacaagtaatcacatgggatttttattgtctttttttatagaacttgcatgaaagctattaatatgcttatcctatatttttaacagaaaaatgaagtcagcaaggaatacttcttaaaaactgtaaggaatattgttggtgataaattgcttaagcaagctacttcacaatatcaaatgcaggtaaataatatttccacttcattgtgttatatgtaaacataacctgtcttgccaccatagctttgtatttttggtgtgatgcaatcttattagtcattcttaccagcactttttgttttgttttgtgggttatttactcatgtttgctcaggcacaacaaagccctcagacaaacccaagcaactattctttatcaggtcaagtttctggtcagcagactgctcccagtggttctgtgacaggagatgaacagaagggatatccaggggcgcacaccatccctatgagacaagctattgccagcactcgaccacctcaatttcggccttccttgtctggccaaatgcggagtaatacgggttatccaccttcacaaaccaatttgcattaggctaatgaaatgggaaacatgtcagatgggaaaggggtccatatgttacaaactcgtccacccaataactccataccagtacaaacaatgcagcatcacgtgcagcgaccacaaacatcttcaccagtgtttggggcaaatagtattcatgcacgtccatttccgcggccagttggagatccagctgcaccatttagaccacaaatggcagattccaatccaagagcacacttgattcagggagctgtgaccacagtatctgggagtgtgccaacacgatccatagtgtctggaaatgcgccaggtaatcaatctacaaggcaacaatcagcaaacaaggagcaaaaaactatttcttttgctccaacaacacatatgaataatgataggttgataggtatgaatacttgatatggccttttaatatactaagggaatggtattctattattagttagctggttatagaaaacacaatttaggcgaaggggtaatctgttttcttgtgtccatgtgcaaactgctttgctctttagttcttacccatgagcttttatgcacatctttagtagtgcctaagatcttttcagacttcttataggttttgatttgatgtgcatggcaacttgcttggttcctactcctaccttataaatatttggcaatgggcattgctcagtatactttgataactgacaaatggctataaatatagtttgatcccataagctgcctttctgttttttccagctccaataaaatcttcaacatttcttttatagccttagtcaagttcaactgtttaagtagtctccatcaaatattgttctatccgaaagagatgagaagtactttaagacaaatgttatggttgaatagaatgattgaactgtagtaatgttcaaaatttagattacaataatagaatgtcattttgaaatttttatccacttgttgagttccctttcaattaactggggatgagggatatatgctctgtgtagtttattatttttcgtgtatgaccaaagcaatagcaaacctaaatggtccaattgatgttctattttttggtgcatgcacactactgtataactttagtattactttcgtgatctctgctgacagatgacatgctccttttgtagtgtctttgaagcctgaactttttgaaggattgaggtttgacttcacaaaagggttgaatcaaaagttttttcttagccacaggtaagatcattacataagggtagacctagggccagaggctcccacatgagtgtggcctggggaagggataaactgaaccaagtctccccccgcaattgcagagaggctgcttcgaacccgtgacctggtgattcagtgagacagctctcaccactgcaccaggcctgtccactaagatcattacataacttatgctatattttcccgagtatgtcctaacatcttccacagtgtttttatgggctccttagaagttccagcccaggggcctgaaactattaaagttccaactgctcattatgaatttggtgccaattttttagatccaaaggtttgtttccatgtcacccattgttattgtggcatcttccataatgatttattccttaactcatctgcttctgtgcatgaaactatgtgtagttaatgctcattggaagggtgataacagatggaaggcttaatgctcgcgtgaaatgtgatttgacagacaatctcacgctgaaagtaaatgcacaggtagatggatcaaagagtttaggttcagtggttcatcctttccttcgttgatactttgctttccttattctactgatggttgttctcttcctagcttacccaagaggcacattactcacaaggaatgtttaactttgactacaaggttgacgtttctgacaagtcagtcaattgtagttttccaaactttcatgattagtttttttgaacgtaaatgattattttttattagcatctgtaataggcaaacttttactttgcttctaggagtagtttttatcatacatttattagttccttgaatcaacacttcacttatttgtacaaggaagtgactatcgagcacaattccaaatagggaacaatgcattctatggtgcaaattatattcaggtaaaaactctagcaatgcactttactttctaagtttcaacttacatcttgatgtttatgcgttgctgtagaaagatgggggaaatgactcatttggtagtttaatgccatgtaaaattcagtagacttggttatgtcctctattgtctattcatatttgtgcttcttgatatctgtttgagttgcatatatctttgccctcaagtgtttactgtttgattgcataactgccattaattaattatcttactactctataaggacgtaacgagggcgtccacaccgcggctccgccggacatcgcaacaatctccccgccccagctctcctctccctgcgccgaggccacaatccctgccgccccggctctcctcgtccccaaatcttgcacgcggtcgtaatccccgccgcctcgctctcctcgcccctagatcgccgcctccactatcgctgatataccagaccaagcaggtagagcagaccaagatgtcgctcgaggaggccaagctggagatggccacgctgctgcagcagcaggcgagcaagtcatgcatggtactaagtcctgcatggtactaatggttgtaatgtagtgatgaaatagctagattaaaataacaaaatttatgtatggctaggatcacaaatagattacgaaatcttttatcgtaacagtataacacacatttgtagataagttatcgcggtattatatgtttccgttgcaacgcacgggcactcacctagtagttatatatatggagtatattgcagctctagtcggcacacgcagcttcagtgtacctagtacgatgctataaatagcaacaaaatgagctcacacacatcagcccagcccagccacaccagagttcacccaccctcattccgccgccggccgctaggtatcaccggcgccattgtaggccggccctgcttcctctagctaggtagctaagctttgtaccatggtcttctgtaaggctagcaaagcagccttcatcctggtgctcgtaatcctcgtctcctctaaccatatcatgatgtactctcgaggcaaacaacccctccgggtgatgcataggaggtttaacctgttgtcacatcattccgctggggacaccatggggacagcaatgacgacccgaggcggcacagtctcgccggacgacggcaccgggagcggcggcgtcctcggagaggacacccgagcgacggatcctggacacagccctggtgcgggccatgcagccaccaacagtggggttgggaggaagttgcttggtgttgttggtgtgtaacctagctagctagaaacttgtctatcttcgtttttcttgttccttccactgccggaatccgggcctttgccgagtgctttttatcgggcactcggcaaagaagactttgccgaacgccgcactcggcaaagtcctgcgctcggtaaagagcttatttaccgagtgcacgacactcggcacagccaagcactcggcaaagactgctttgccgagcgtccaacactcgacaaagatggctctcggcaaagggccgttagcggccgtctacagctgacggccgtcagtctttgccgagcgtcaaatatctagcactcggcaaaaaaagtcgaagacactcggcaaagcatatttttatttttttaattttggttaccaaactttttgtggtatgttcctacactatgtagacctatatgtaccattttgggacaattataacagtgttttctatagctagtagatttagtttgtttatttgaatttcttcggaaaattcagatttgaactgtaggtcactcgaaacttggaaaaccgtgcatgcaaaaatgatatccatgctacttagcacaagttacgaccgatttcaggagcgggccggaaacttcgagcaccatgctcactcaacatgaccgtgaacttgccatccaggtgtttaaaaattgtataaaacacaaacagagtcagaaaatcatgaaacttgtccacgtgtcatgatatcatatgtagaggctgtgataaaaatttgaaaaagtttcgaaaaagctgtaacgcactatgtgtacaaacctaagagatccacattgaaactctatgatttcatgtgtagttctctcaggtttttacacataatgtctcacaaatttctccaaacattctaatttttttatcacagactctacatatgatatcatgacaagtggacaagtttcatgattttctaagtttgtttgtgttttataaaattttgaaacagctgtatggcaagttcacggccatgttgagtgagcatggtgctcgaagtttccggtccgctcctgaaatcggtcgtaacttgtgctaactagcatggatatcatttttgcatgcacgatattccaagtttcgagtgacctgcagttcaaatgtgtttttttcgaagaaattcaaataaacgaactaaatctactagctatagaaaacaattttctaatcgtctcaaaatggtacatgtaggtctatatagtgtaggaacataccacaaaaattttggttgggaaaattaaaaaaataaaaatgtactttgccgagtgtcaagaaataacactcggcaaagaagcctttgccgagtgccagctggttgacactcggcaaagaattgtaaaagtatatttgtcgagtgccgcccagtgggcactcggcaaaggcttctttgccgagtgtcagcgatctggcactcggcaaagaatattttaaaatttaaaaaaatctttgccgagtgccagatcgcgggcactcggcaaagtcaggaaataaactaccggtcgttcttctttctcctttctcttctctcacgctctcttctttctcttttttccctgccgccgcgtcgtctgcccctccccacgccggccccccccccccccccccactcaggcgcccgcccgcctgctcgccgcggcggccactcgccgcgccgggccccctccccacggtcgtgcccgccacgcccgccgcacccgcctcgccgcaccgtcgtgagctgtgtcctcgccgcaccgtcgcgagcaccgtcattagcatttttgttaggtatgttagttttgttgctataattagttgtttgttagttttgttagcatttttgttaggtatgaatatcgtgaatatgaatgtgataaatgcgaatttgatcggatgtgatgaatgtgagttgaatatgcaggttttagtatcctccccgtgtaagggaggtgctgtcaaaaatttatacttagttatttagtagttagtgggtagtattaggtggttagtatttagtcggttgtggttatacttatagttatctatctagttattagtgggttgtggttaagcaataaccatccatagtggacattgaatatttaattcgtgtttcaaatacttgtgttaacatacttgtgattcttttttacagagaagatacttgtcttcctagccgctgcgggtctgcctgcaccgcgtcgcgtcgccactgcaccgacccgccacagccccactagcctgactccaccgccaccctaggtataacctctatttccgcatcatggtcgtagatcacgtaacccagttaggtgtctcccattcgaaagagatacggtgtagatatgcagatctttgcatatctacaaatgtatcagtttcgaattgtccacgttttttggacaacccgcgatttgagatagacttaaccgaagcgatcgaaatggaagtagatattgaaatggttgttgatgaggaggaggatgaggtgcaaaatgagaatgacttagaaatgcttgaaggcaatgccaatgacgaaattgcgccttcagatggtgttgactatgaaatggttgatagtgatgatgacacttatgatccggctaacccggacacatatgaagattatttttaatcgatgtaatgctatatttcatttattttgcatatgtttctaaatacatattacatgtgcttaattgcttactcttaattgcaggttgttggacaaagatggtgggcggtgggacgaggacgaggagggggagggggaggaggagcacccgtaggacggaggaggaggcacagcaggacgacgtcgtacagcagcaggtggagcagcaagtcgctgtcgatgcgacgcagcaggacgacgacgatgcagcgcagcaggacgacgacgatgatgccgctcagcaggacgtctcaggttttggctcctcaggttcgaggagcatctacctgcgaggtcccacgagtctccctcagcgacccatacttcgtgacagacgtccgctgatacgacccgatggagagaggtaggtaactttagatgttgttgctgctttttcatattatatgttcaaattaataatagaaactaatactttatcttaatcacttggaaaggtcttggaaggttttggagagtgcagggggtcacggccgcaaccccaatggcatcctcggccttctatgcagggaacacttccctggacttgtcgagtacgccggagtgatgagcccagcctacaccttcgaccactatgccgtcgcccccgatgcaatagatcgggacggcagagaattcaacaacaaggtggagcgggtgaagcaagagttgtggataagtcttcctcgcactatattgtttaataagtcgcatttgttgcatattcttgaaataatgtatggatacatcgtctttgtatgtaggatatcttcagatgcgaggctggatacgaggccagggcggatgtggtggctaccacgagctgtaagaagctcatcatggacatgcactacgaggcgcgcatccaggccatcgtcacttaccacggctccgtccttggggagaaggtgagcaagaaggacgcccgaaccatgtcgttgactccggaccagtacttgcaggtaaatacaaaactttattattggtactaaatatgcttaattttatcttctgatatgtcgtgtacttgtatttttttagatgattcctcattggtgcgccgcgcatcctgagtgctgtgagcagatggtgcagaggtggtgctcggctgagtgggacgaggcgcacaacgctagccgggaacggcgtttgatgatgcaaggtccctcccaccatcaaggcagccgcagcctaggcaaatacgcggaagcatgggtacgcgctcttttttatttaggtatataactttcgattagacatgatttctaaccatctcgttggttatctcgcagtcggtggcacatggtggcgcgccttgctccacgttctcggcatatgctatggcccacaaggggaaggcgacgtccgacgtcacctacaacccggatgacaggcccgaggcgtacaccaacctcgccgtccacagccgcctcagtgagtacaccgccatggccaaggaggtccacgggccagattacgatccgaggaccgaggacatcgacggagatgtcctcatgagggtcggaggaggcaagaggcatgggcggtactggattgccgacagggcaatcgactcgtcctccactcccactctatctcaggtgcgagctaggagcacgagcgcgagcccagccatacgacctcggcaggacagctcacagcatcgtatccagcaactccaggttattccttatctattcatcgttcattgattattatatatcttctctttgcattatcgtaacattagggcgaaatataacatactcagctagatgatgagaggaggcaacgtgaggagctggagaagaggatggcggagatgttcgcgtacatgtagagccttgacgccgcacagggtcatgctccaccaccttcgttgttccctgcagctgaccctgctgagttcactactcgtgtgagtatcaaaattttagtactgcatgatatatattcatatgttctcacacgtgcaatctcttccctgtgcagggtcaatcggcggtgtcgaacaaccctcacgcttcgtccagcccttcgccgaaccagtccagatgcccacctcgttgatgacctgttttgtgatgatccagacttatatttgtgagtgttggtgatgttagttatacttggtcttgtgagatacttattgagacttatgtgctgtgaaacctaatttatgtggtgatatttgtgatatatatggtgttgatgataaatgtgttgattctgtgatgcgaatgatatataatgtgatgtgaatgatatatatcttttgtttgtttggacggaacagcaaaaacaaataaaaaagggacttcctggtcactttgccgagtgtaacactcggcaaagggtatctttgccgagtgttataaccttggcactcggcaaagaaggaaacctgggaaccggtaaagccttctttgccgagtgttgtggtcaagacactcggcaaagaagccacctttgccgagtgtcgcccagcgcactcggcaaagggactgacaaaggggcccactggaggactctttgccgagagccagtccactagacactcggcaaagaagcctcctttgccgagtgcttacgaaagctctcggcacagggactggcggtggggcccactggagccgtctttgccgagcgccatgatagcaggcactcggcaaaattggcctctttgccgagtgccgaagaagacactcgacaaaggatccgtcaccgtcacttggcaccgtgacgacgacttttctttgccgagtaccaaatggcactcgacaaagtctttgtcgagtgcccgacaaaaagtactcggcaaagaggccgttgccaatgtacagttcggcaaagtgtttgccgagtgttttatatgttttgccgagtgcctaaggcactcggcaaaggagctatgtccggtagtgttccttgtttttcttctcttcccctcctttttcttgagcgatgaaaatccaatgtgcgttttcttctgttcgcacaacgaatttattgcctcatatattttactgatctctacaatggtttatccattccttgtgtgtctgtcaatcagaatagcctaccatacgtgtctccttggaccggccagtgacgatctctttatatatacaagtactagtatagtgcccatgcattgcgatggcatacaaatataatgtccaaacttggcgaagacaatgcccatgtcatttgggccagcccaagtccatgcgtcctaccagatgtgatgctagagatactgtgtttccgattcactgctagaagcaatcagcatatgcaacaatcttaagagcacttaagagctttctgtgttgtgacaaaccacctctcattggacgacaaacatataccaaagttacaaggctagagtttttgatgtttgtcgttcatatcttttaattcccgtggaaacccacatacacatacctagtaaacatataagagccattgtaatgttgttcagtttatgacctatgcaataaacataaaagagcaaccacaccgttgttcaaaagccaaacagtacaccgtgaaaaccgtccattgaacaatccaaccacttggtccttcgtaacaggataacatgaactcaaatgcaaaatcaaattttaacggagtctagtatagctccctatattagcaaaatcattcaaatttcaggcattctgcactgcaaatacatgtaaaacaagaaaattgggagtctatttttgggaattgtcagttgagaagtggatttcttcgagcgatttacagtatctctgtttgtacataagcaactcttctgttcacggatacaatctctccagttacaaaaagatcatcagaacaaaacgtcttttgctacatcatctaagagctattgtcaaaagtgttggtaggaggaaaaaaaggacctaatcctttggcccatcaagaacatataagaagacaacccagagcctgcatagtattctagtagcttctgaaaattttattgctactattactttatcatcaaggctgctttagcagtacaacgccaggacaagtacaaagaaatgaaacatgaaacaaagtagaaaagaagccaaacgtgatggtgagaacagaggatcctctagctgaacacaaaccagatcaaaatttttgagaggattgcagcaccctaagaccccatgagcccttggatcgtgtattgaagagacttcgcctagtattccttaaaaagtaaagcttgtagagtcttcataacattataatttggatccaacttatgttgctagccctgtaataaaaatgaaaagaaatgaagaatcacaaacggaaaaaggaatgcctgcaaaacgtattcttgcaattaaagagacaatggtgtgatacacaaatagacaattacataaagcagtttatatagccacagtggaatcccaactgtttacaaatggacgcatcatctttagctggaaattagacaaacaaaagaactatatgaggagcaacatgtaaaagcaagcctaattctgatatacacacatacacaaacatacatacatatacatatacatataaggatcataaatggcacaaggataatggaaatagtagggccatgtctcagttgacattcgtgaagcttcatgatgcccttttgacaagttcttaaatagaagtttagcttgctgcttatagaaatcagcatccttctaatctcgcccatcatccaacccttctgctagtggacatccattagtgacacgagctatcattgttagcttcaccatggtgtcaagaaggccagaaccactataaagtactccctccgtcccaaattaaaatctgttttacctttttagtgtatgtgtcctatatatgtgtcaagattcgttatcatacatatgaatataaacataaaaatctagagctaaaacaactactattttgaaacggagggagtattgtacaaaaacctacatagctgtaatgaaaaacataaaatgggtgctcaaaaaataaaaaacaatccacttcaatcgtataaccatcagcctatcacaatataaaccaagacatcaaattaggaatagagtgtcatataaacccacctttaacttcattcgaagggaatgaattggatggctagtgttgtctagtgttctcgcagtgcatcttttcattgatctctctttatcaagacgaatgcaacaactgctctaacaagaaaagagtctgatacaagagggtgcagggtgatgggttgataaaaatattattgatacattcacaagcttttgcaacgcaccaatttggcacagtaaaaatgttcccatgaaagagtaaacacaaagacactcaaaaaatcatgcctaaagctgaatagtaaaagcacacatgtacacacattactaatcatgaacacccttttattctttggatcaattatgatattgtatactgcctctggtggtaatcctcccttaaatctcaaattgaggttgcaaaaggaaccttctagtacagtcagctgtaaacatttgatcatgtaagaataagttactacattgtatgaacattcttgaagtaaacacaatcacatctacttctaaagcaacacgatagatagtaaaatcacacaaccccatcctcaagaacctagaaacaattagcattggtgtctgactggtcgttaaagacttaatctgctcaaaggctgctatgatatgcttttcacaactgaaactaactacaaccacatcaaggacatacattatgatgtgaccagaagtcatttttattgagcagctctctcagcttcatatatccgtccaagctcaagcaaatggaaggcaagcattgccatatatgaaattctgatcaggattctttagcaaaacatcataagcaatgagtaccacaaatccagtgaacaaaagagcctgataaaagcgggtggcagggtgctgggttgataaaaaatattattggtacattcgcaagcttttgcaatgcaccaatttggcacaataaaatgttcacaggaaacgatgaaaaggaacacaaatagacattatttctttaacaagagacaatcgtgcagttatggaacaattgacatataatactctcagcaatttggatcttacctttgatacaaagatgacattattgatattccttgggaagaatcaacacaagtacctcaagcaaaaaagaaatgccacatcggcttcaacttccttcagtcaagcccaaaatttgaagcccataaatacataggaaccccatttggcttacttgaacgaattttagggacaaatctggctttcccatatcgaagcagatgagatgggctctcttgagaggcaagagatccctggggaattgcttaagaagctgccctagacgactacattgtttgctgactttgcaagtagtagaggtctatacccttctagtccccaaaatcaacaaattatggtatgtcaaacatttatgacacttaagtagtagtagagattactcataatattgaagggtgattttatatttcacattgatatactttaatttattattctataatacaataatatttaccagggtacggctcgcgagcccacttcgagccaaaccgagcttcattcttgagctcgtgcaatggacgagccaaaccgatctcgatcagccatcgagtcgcaccgagcggagccgctcagctcgtttccaatcctatatagcatatcattgcataattactgaatcagaggctatatgcctgtgacatgacttaagtgtaatgatttacatcattaccctactaccaatacttttgtaacactaccaataggaacatcgccaacagttaatacctattttgtagccaaatacatagcattcaaatctaacatttatggctctttagttagaggatgcatgccatcaaacaaaagtaaaaagtagaaagtcggtaagagaaatctaattgagagacatcacagtaaaatattggagaaaatgaagtctaaatcaagagggtatgggtaggttgcataatacatgagtttcccaagaacaataccaaattagtttgcacgtgttaaaccaatatcatcaggatattatttcatatgttcctttatatttaagcattccaccctgtaaaaaatatgataaaataaaagaaaagtgaacatgaataactattccaatctataaccaacacagtttataattatcatacatcattgagatcatcagttagacagttacaaaaaaactatatatatctcagaggttcagaacaatgatgcaaggtgaagtcgtcattgatccatcacaaagcaaaggtgaaaataattatctaaaagttgagaacaaattactaaagaagcaaaaaggatcaatgctaaggatttcgaaacaatcaacccaccacaactacaatcccaaaaggttcatggcagcaaagggactgaatatgtttacctgatgaattccactttcatgggcaaaggcattggcaccaacaatagcttcatgtggttgtacatgaagtccattgtgctcttgtacctagaataattagagcatttgcgccagaaatttcagtcatctgaaaaattcaagcgagatagaaaaggaaacaaacaaggacaattattgtaccattttgcttgtcaaagtaatatgttgggaatttattcccgtatatagaccatctaagagctcctgacgacatttaattgccatgacaacctgaacaggagatcagaaatattaggcatgcaaaaacactctatcaaatcaattcagattcctttcgaaaatccatcataaattacttcataaggtatatcatcatataatatggcaagtacatgagctcacctcttccaatgaagcatttccagctctttcaccaataccattaatagtcacctctaacagtcgcgctcctgcatgagcaccctaaagtgtaagtcaaattagtaacccggttaaagattaaaccaatgataataaaatagaatcaaataaggagaaggtatgtaccgctaatgtgttggcagttgcaaggccaaggccattctggcaatgagtggaaatgatggcattttcaattctaagagtgttttcctttatgtcagaaattaacttcccaaattcataaggaagagtgtattcgacggtgtctgggatattaagagtggttgccccaacttttatgacttcctccagtatatggtacaagaattctcgatttgacctggatggtaattgggaaactgaaatctatcaggccgcagccttaagcgcatcaggggaaaatagatcctttgtctgtgaattagtacaaaggtttaaggtcatcctatgatgatctaacattttgcatttcatttgcgcaagtaaaccggccatacgaaccaagataaaactgcaaagagacgtacatgtcggcatcctcagggctgaactcgacatcggcgcgtactagggggcagagctggagaagggcagctcgtgttggccaccgaggtgtccttccggagagagggagatgggacgggcgacgtcggcgttcaggttggctccggagaggacacaggagtgacgcagcgtgccccttcgaggtcatcgtgcgacgccgtggtgagggttggggtagaggagccagcgaggctggaggagaccagcataggatgccagagccgtgcagatggcggcgtggggagagaacgtaaggggggtgggaatctcgtgaggagcggacgaggtttggaggctagggtgtcgcgggggcggggctggcgggggcatggcgtgcggctgattgaagggtgcagatggaggggattgcgggctcggtggcaagatggcggggcgcggtcccttgggggcgaggattgcgggcttacggatggaagggccacctggcggaggcacagtttacggatggaagattctaccatagatggaagtgggcgacgcggtttctggggcggacggagcgcagagggagcatgggaggggcgcgctggcgatggcaggcgggcgcagcgcgtggggaagacgacatcgatggaaagaagcgcggcgggcgggcgggatgcagaaccggcaaaaccgtgcatcactggccaatgtggacacctacgatagacacttaagtagtagtagagatatggggtacaatagagttgattgcaatataatgcagttgtagctgttgaagaaatagtcattttcagttttaatttaatccagaaaatcatactgatgtatgtgacgatatgtatgtgtatatgtgtatcactacccacataatcagtaaataacaataaaatattcacaaatacaaagaacagattgtaccctgcgaagggaccgatgctcaagccattagtggctccattcacacgagacatctcgtgtgtatgttcgatgtagtcgtatgtagtcgatgcaggcagatgtacgcagtgcagtcactcgaacggcgctggcgacgaggaacttgatcagcgttggtcgggtggacgaagcgagcagtcgcgagtacgctcccgaaaaacctgatcacccgcacacccgtgcaagtgtcgctatgcggaatgcgatttcggaggtctgctcttccacattctctgtgctcgcagaaggtgggatgaggatggtatgtacgcaacgcgtctgagaattgtatgtgtgttctcttgtaaccagaagcagcctcatctcctccatatatatatacacgcgcagagggaggccaacggacagtaacagtcgccatcagagctaccgttacagctagccagaaaccgacgccattagagctaccgttacagccagccagaaactgacgccatcagtgacgttcgttaatagctgacaatcattacaactcgtctgttactagccataacataggaaacggccagtaacgtacgatagtaatggatggtcatcactctaggcaaaatgtgtaaccgttaggaaggaatattcagaccaaggttcgatctaccacggccactgcccggccagcagcgcacgcctgtggcagtccttcatcattttctcagcttctcaatagatgcaccaaaggtccacctatttaagttgattgaattgtcccttgtacttccggcatggtactagactactagtacaccatagcattaaagtgagcttttatcattgactattattgaatattaatttgggctaggccctccttaattcaactatccccaccaaatgctaagtcacactaaaattctctcattatctcaaacatttgatatattggtgtttcgatggagactgttaagttgaacatccacctagaatctagattgcacttgaccacaaatgcacaatagactaggccttgaatttgtagttttgtgtggaataagtttcatctaacctctttaccagtactagattgtcgagtgcatcccttctggttggagcatataagtcaaactccatagcctttcatgggtatctagagaccacctagatctcataactgtgactagcagttaactcatataggtatgttcctctaaagatgttctgtaggataacatctttgcttcacaaagccacttggaacatattaaggtgtaaacaccaacctaccttacaacaaggaaagatgtgcatctaaaatgaaccttattaagggtctttcctctcagtctaccactagcttgtttcaccattctaattcacgggatcttcgatcacatagaacatgttaccactatgataaactttaggtgggtctcaggtccatttcactcgatgcaatatctatcacactacgtgatagccccttagtaaattgatctgtcagatttttagacgtatggacatagtccaatgctattactccggagtttctcaatttcttgatagattttaaacgcctctttatgtgtctatattatccttagaactgtttatctagattatcacagtatgattatcacagttcatagaaatagtcggcacaggtttttcaaccactggtaaatccataaggagttcacgaagccactcagcctcaactgaagtggtatctaatgttgtgagttctgcttccatagtcaacctcgttaagatagtctgcttgcaagacttccatacaacaatgccacctccaagtgaaaacacatatccacttgtggcatatatctcatcaacatcatatatccattttgcatcacaataaccctccatagtgttgggtacccggtataatggatgcctaaactcatagtaccttttagatagcgcagaactctctcaagagcatgccagtggtcatctcccaaatttgaaacaaaccggctaagtttgctcatagcaaacgagatgtcaggcctcgtagcgctagctaagtacatgagtgaaccaattatttgggaatatcttaattgatccctagctatccttcgatttttcttcaataacttactaggatcataaggtgttggagcaggttcacattcgctataaccaaaacgactcaaaaccttttccacatagtgggattgcacaagtgtgaccccaccattgccttctctcagtagcttaatgttaagaataacatcagcttctcccaaatctttcatttcaaaattaaagtcttttgtctctttaatcatttcaagactcgtacccaagattagaatgtcatcaacatacaagcataaaattactcccttgcccccaccataccgataatatacacatttgtctgcttcgttcacaacaaagccagcagatgtcagagttctgtcgaacttttcatgtcattgcttaggtgcttgtttaggccatataaagatttcaataatttacacaccatgccttcttgaccatttgctacaaacccagctggctgctccatgtagatttcctcatctagctctccatttaggaatgttgtcttaacatccatttgatggatgagaataccatgagaggcaactagagaaagtagcacacgaattatggtcaatcgagccacaggcgaataagtatcaaagaaatgatcaacttctttctgtgaaagcctttaatgacaagcatcgccttgtacctttcaatagtaccatcaggcctaagatttttattgaaaacccatttactcccaatgggcttacacccataaggacgctcaatgacatcccaagttgcattagacataatagaatccatctcactccttattgcttccttccaaaagttagcaccaggagaggaatatgcctcttcaatggtacttggggtgtcatccacaagatatacaatgtaatcatcaccaaatgactttacaatccttggtctcttactctttcgagttgatacattgtcatcttccacatgattatgtatatggaattcctcagtgtgttctacataatatgttcatggggtatcattggttcatcactagacgtattatgtatagctttcatggaaattcgtcctcaaagaacatagcatctctggattccataatagtacctaccaacatgtccggtactccagagtttataattaagaacctatatccaatgctgtgaaaagcatacccagggaaaacacaatcaacagttttcggtcctagtttgcgcttcttgttagttagcacattcactttagccaaacaacccatatgcgcaaataggagatgtttaatttcctctttttcattcctcgaatggtgtgatttctttgttctttgtgggaactttattcagaacatgacacgccgtcaagatcgcctcaccccaccattccttagatagtccccaagtctctaacatggcgttaaccaaatcaattagagtttggttctttctctcagcaatcccattgtattgtggtgagtatggtggtgtcctctcatgaataataccatgttccacacaaaaatcagaaaaaatcaactgaaaaatattctccaccatgatcagaccttaacagtttaattttcctcttgagttgattttccacttcagctttgtaggtcttaaaataatgcaaagcttcgtcttttgactttaagagatacacataaaaaatctagtagaatcatcgataaaagtaataaaatatcgtttgcctcccttactcaatattccgttcatctcacataaatcggaatgtattaagtctagtggtgccaagttcctcgcctctgcagccttatgaggcttgcgaggttgcttagattgcacgcacacctggcacttagaacctttgactaaatcaaatttcgggattaaatttaaatttgctaaccgcgacacacaaccaaaatttatgtgacaaagtcatgaatgccaaatatacgactcgttcgaaatcacattgttcacagacttattacaaacataatgcaaagataagcggaacaagcctccactgtcatagctttttcaaacaaatgtgactcgaatacaagtttatagccatctcgacatagcaacgagccactaacaagattctttttgatggaggggacatgctgcacattcttcaatagcactgtctttcccgaagtaaacttcagaatgactgtaccaacaccaagaacacacacatgtgatatgttccccatcagcaaggctccagcccctttgcactgataagaagaaaacaaagaaatatcagcacccacatgaatgttagcaccagtgtcagcccaccactcaggggattgacacactgaaagaacagtaggtaaaatattaccataccccgatgttccttctgcggtcttgctaacaaccatgtttactgatttcttctcttgagctggttttttctcttgcttaaatttgcggtctggacaagcgtttggtcagtgttcagtactcccacaaacaaagcaaccagctcctttgttcctcttcttaaacgaggtttcctggttgggcttcgtggcattctgttgcttgttcttccttttattattatgtgacgcattggagttcttcctttgtaccatattggcactagaagtctcaactccttttccgcgagtgtcttttgctctcgcccgctcctcaacatcaagagacccaataagctcaaccacgctaaactcttgtctcttatgttttagagtggtagcaaaatccgtccaagaaggtggcaacttagcgataataccgtgaaagtgcattcatcccttttgtgagttttggtgatttggatgacaacacatttaaaagactaacaagtttgctaagtgttgaacaggaaattcagtatgatgaacatacttgaatggtgtataatgatcgtgaacaaaggttcaacacaaggttaaataaccagtgcgacaatgcaaatggatataatatgatctctatattggtttaaatatatggacaagacctgagaaatcactacatacatatgatcagaatagaggatgaagtgattaagaggattggtcaagccaaagtgaataagatatgaggaatcgtgaattggcttgaccatattaatatcagtccatatatgcttatatgagaatcaaactagagcttgattaatcttaacagttatatctagaagacattcaagcaaggttcacaatatttaagaaatgattctctcaatggatgctcaaaatgatgtgattcaagaatggcttgatagggtgaagatggcaaggaaagggcttcgaggaactaagcgaaggtgaaggacaagcgacagcttgtagaccgaggtaccatggctaaggtgaagaagagagtacttgcactaagtcgatgaactaatcaactatgaagagttataacatgttgatgcatcagtaaggtgacttgaagccatgatttgaactcatatatgatgatatggtacaagtcacagggtttgagttgcgtttgcttcaaaaggtgagacaaagatgtttgtgatccttatgaagcaacgccatggagaaatcacacatgagacaccaattactcaaggagtttaattaattatattttacttgaattgagtatatgattcatcgtactaccaaggggatccaaaaataaggttggtgtttgccaaagctcaagcctctatattcaaaagctattttttgaaaatcaaaaatctctttaaaattctatggttgactgtggttaggtttgagaaacctagagtgtttttgttgaaaagcagctgagcttttcagctgaactaaactttagctgagttgagcttcttcagctgcagttgagcttttcagctgagctaaacttcagctgtgttgagctttctcaactccagttgaacttcaacttcaactggggtccagtcaagttcaaccggggtccaggcaggttcaaccggggtccaaggcaagttcaaccggggtccagagaggttcaactggggtccaggaaaagttcaaccggggtttagagaggttcaaccagggatgggctgtacgcaacgcttctaagaattgtacgtatgttctctcgtaaccagaagcagcctcacctcctctgtatatataaacgagcagagggaggccaacggatagtaacggtcaccatcagagctatcattacagccagccagaaacggacgccattagtgacgtccgttaatagctgacaagcattatagctcgttcgttactatccataacataggaaacgaccaataatgtacaacagtaatggacggtcatcactttaggcaaaatgtgcaaccgttaggaaggaatattcggaccaaggtccgatctaccacggccacggcccggcggcgcgcgcgtgtggcagtccttcatcattttctcaacttctcaatagatgcaccaaagatccgcctatttaagttgattgaattgtcccttgtacttccgatatggtactaaagtactatacaccgtagcattaaagtgggcctttagcattgactattattgaatattaatttgggttaggccctcattaattcaacggtagcttctaggcctaaccatcccacccccaaactaagcatagatgaactatgtttaggttgctacaaaaatattccaaaaaataattccctccgtcctaaaatattaaccgttttagcattttaatagattcataaaaatatgtcagatccacaagtcatacgaggcaactgtctcgagcatgatggctggagaaccaatatcccccttgtaaaatgtcttcttcctccacttccaatgcatgcaatctatactcaatatcataacagaaaatcccctttccacctccttagctaagataagcctaagtcatcgacaatggcatgataattgtactccgccctgaaacatgcaataacacctctacagaatagaccaaaaactccactcgtaggggaaatactgcccccacggtaagaagaagcttaatcggagccctgatcgagaaaggtcacgaaagatgtacccctccccccatgcaacatgagagtccgccccctataggccagatctttactcgtgctttgagccctactagcccttacacgaggatccgccccataggtcagcccatctcatgtgcacacaactagggaaactagtgagtgaccttgttaacctcagcctaaaattcgctcccaccgggattcaaacttaggacctgaggagtgctactcagacgacctaaccaacttaactagggaccctttcgcacagaatagtccaaggcactctgaggtggaactttcctcattttgatgtactcatcgatggagtcagcaatgctacagtacgcaagcatgcttaggccaattgtgcacttctggtgggggaggaaacactgcggttgaatgcatcggttcaaaaagtgaagtatgggaagtgctcacccaatctctctaagatatgaaggaagagacttctctggatgcggtaactttgacaaaagtagagcagtgggtagacacacaggtcgttgaaatggtcttgcattaaccggtcgtatgcagctacatagtcgcagtcaatgtatctctgatgttgccttggccgcctcatcgacctaggagactcggatgcaagctctgacgcctgttgcattatattttgttgtaataacttgaataactcttttgagtcatattgatgtccaagctgaacgaaaacatcacaacaatgcttgatttgactgaaacgagtgtaagaggattataaggggtggtagagaaatttgaagtgtgggttgtgtgaatgagatcaaacactcctctatttatagaccaagttctagtttttttatttttgaaaaaaaatcaaaataaagcgaagcaattagaacttgccacatggcaagaggcgatcgttatcgacatggccgcaatagctgttcagtaccaaccagtcagtatcgaccgacgcggtcccaacacggtcaatagtaaccctggcggccgatcagtagcctcgacaaccacaagcgaggctattagtgctggcaccatgtcgggtgatactgaccattcagttgtgccacatgggtgggtgggcagtagagccaagcgccggcactcgcctaacatgatctaaaacaatcgataaaactgacagattggttgcggttcatgactacctagacctggtcgaccacaagtagaaaatgagtcgagccgagcttgactcggctcgtccatttcacgagctagagagttaggctcggctcagctcgaagtcggctcgcgagctacaccccgatatatattatttcattatatagtaaattattaatatataaacataaaatataaaaatattattcaccattatgaattatcttatatttatcatcaaaggctaagaaataagccgactatctataaattatctaatatccatcattattctacatattgattaactaggtgtgtgcccgtgcgttgcaacgggagtacgctagtgtcggggaccataattaggggtacccccaagactcctaaactcggctggtaatcaccattagcacaagctgcaaaagcctgatgggcgcaatttaggtcaaggctccgtccactcaagggacacgatctcgtctcgcccgagcccagcctcgggcaggaatagtagacccaggcggattcacgcctcgcccgagggcctcctcaagcaacaggcgcaccttcaactcgcctgaggcccagctcgggcaggctttgcagtgaagcaaccttggccagatcgcctcgccaaccgaccgtatcgcaggagcattcaatgcaaggatcgcctgacaccttatcctgacgcgcgttcctcagtcggcagggccgaagtgaccgcagtcacttcgcccctccactgactgacctgacaggaaagcagcgccgcctgccccgctccgactgctgtgccacccgccagggtgaggctgacagcagccgagtccagcctcatgcgccataggaagctccgcctcgcccgaccctggggctcggcccccgcctcgaccttggaagacggtgtccgcctcgcccgaccccagggctcggcccccgcctcgacctcggaagacggtctccgcctcgcccgaccccatggctcggactcaaccttaacctcggaagacggtctccgcctcacccgaccttggggctcggactcaagctcgaccttggaggagtcaccacctcgcccgaccttgggctcggaccgaccacgttatagggggtacatcattaccctacccctagctagctcaggctacggggaacaagaccggcgtcccatctggctcaccccggtaaacaagtaatgatggcaccccacatgctcccatgacgacagcggttctcagccccttacggaagcaaggagacgtcagcaagaacccgacagccccgacagatgtgcttctatagggctcaagcgctcctccgacggccacgacatcacatgcacagggcactaacacctcaccgacagccacatcggcatgtacatagggctctggctcctctctgccggacacgttagcatactgctacacccccattgtacacctgggccctctccttacatctataaaagaaaggtccaagaccctcgtacgaggaggtggccgcgcgggaggacgggctgacagacaggctctctctctccctcgcggacgcttgtaaccccctactgcaagaaaatcaatttctatccatttttagaaggttaaatggtccaccaaacaatttatttttctcaaattctccgagcatttactgcaccccttttaatcattgttgagtttctgtggttagaagtgtgtagtaaatattataacgtgcttttagaaccatcttcagttgatgaatgcttcagtcgattaaaagtagtatgatcttttctatgtcgtactaacatattctaaattttaaaatgaaataatgaagcaaaatgtcattttgtctcaaggaacctggaagcaagaacaagattacatcatattaactcaagatgacttggtgataaactgatacttgcagataaggaagaaatgaatctcaacatgagctctccgatcaaacgatgttcatttactgcaatctgaaggttcgacattgttcacaaccattaccatccaaatccaagcaaccgaaacctattttaggcttactgcttcaattatacacagacaaaacccgacagtaccatgttggagacgtcatactggtcacaagtctaataacattagtgacctcaaatctccaacaaaacaacaaattaaccgctcgcattaatgctttgtccttcagaccagtatggctgttgcaatttagcgacgaactggcacaatctgctcttgcaattttttcttcggtcagccccactcgcattaatgctttgtccttcgatggttactgagaagatattcattgcagtatttgttgtattcatacattcaaatttggaacaaatatgttattgttgccctagttggagcaccagacaagttatccctggtaggccatgtaacatagtgagaagctaatatggaagactggaagtgataccatactttggcctagtgatggtgcaattgcattacaggatttacagcataagcggcaaaggaaagaaaactaaaacatgcttcaattgcttaccccctattagctgggactgaaagaagatcagcttgtactgcacacatggagaagtcagtcattgtacaaacaagtccaacaataggtaagctaaccaacctgtaacaatttttagtagagagtctagcttaacagtcacatcattccgaaatatcctaactactcgacagaggtagcccttcaagggaccctttctaatgcgcagcatctgcccaatagagaaaagttgttctctggtgctcctgtaaggcccttcagctgtattatgaaggaaatcagaacgatgtacttacatgcagaaaatattacagaagaaaacaagaaacacttactttttatcctagaatatatgttgtatcctagaagagaatttcaaaagctctgtttctgtcggttgtatcccccaataaatcaaagaactaagtgcaacttttttatacagaaatccatccttgaacatcaaaccatcaagtacttcaaaaacttcgctagtctgacgatcgcgctttatttcaatgtgaggcctgaagaacctgcatgacaaataacagtttggaaactgtgtcaagactggttaaaataaaatag

SEQ ID NO: 4 - DNA, 66950 bp, Zea mays
gtgaattccaagcttcggatcccactgtgctggaaagactactacaacggaaaataagactacaagatcacctcagggaacttttgctaaatacctgcaatatcagttgcagcagttagtcaaattgcacaacagtaatagcaccttatactggttagctcctgccagctagtaaaagaatcaatttgagttgagatatattcggtgttttgagccttacaaggtctagatttcttatgcgagctccagaacaagagctgatgctccgcctccaccgttgcagacaccagcaactccgatcttgccactcttcgccctgagaacctgttaacaagaaacaatgattaggagggtcaagcaccatatatttgatgtcccaacatgatggcaccatattgttctcaaggttttgcttaaagaaaatgaagagaaactactgatcaccagcaacaagtgaaactctacatttgcagctttatacaagaaaaacattgcacattggaaaacactaaggaagtagacttagtagcaatagtgaagatgcttactgttcatcacgaaccctatgatgatacggtaacatatgtcagaattcatcaattactcaaagaccatcatctatttttttactagaaaaacattgcacatttttttaaacaaaagggattgtaactcaaaagataaaacaagcatcttaagatagaacttacaccaataagggtaaccaaaatgcgagcaccactgcacccgagaggatgtcctaaagatacagctcctccatgaacattaatcttttcctgcaaacacatatgttgttagtacatataatgctgttataatgcaattacatgttgctgctgcatagcaaataacaaaaaagggccaatatgtactttctgaaagtgatgttttaacttctaaaatgcacaaagaatggcagtttaatacaggtgacacttactgaaggaattccaagaagcttttgatttgcaagtgcaacagcctatattgataagtaaaaaagacattattacaaaaaaaaagtaataagtaaaataagctctcaatgcataacaaaaggcttacaaataaagaaacccaatgcataccgaaaaggcttcattaatctcatagaaatcaacatgggatgactctaatccagcatttgcgatagcctttggtattgcaagtgctggagtggttgtaaaaagctccggagcctgtataaacagcatccacattacaaaataatattccagatcacaagttccaatagttgataaatttcgatatctaaaatagtaacataaaatcgttccagataaaaataacttcctatatcctaaaatatttagatcacaatgtgaattagaataagcgcattctactcttaggagagctaacaattgttactgtggcttacttgagctgcatcagcataacctttgatccttgcaaggacttgaaggccaagctcttgagccttctgcccactcaccaaaactaatgcagcagctccatcactgatccatataaaacaaattagatatgactggttgcagaaggctagacaagccatagtaggcagtacaccggacagtactggtcagctaaaaatagacacagtacaaagtgagacagacaaggtctagggcaacttttgttgtttgaatgggcataataaggcatttaaaatgtttttactttcttatgtgataaatcattcacatcgattgggtaccaattctaaagaaaaaattaccatctatttcacagagtagagcatacccaagcagtctaaaaacaaatagagaaacaatgaagttgacaaaatgcaagcataatatatcagttaaaaatgcatgcataatacaataatataatttaactgtcaacaatgaaataggttgtccttcatatctgtcagctaaacaacatatggccgaaaaacaaggtctcagaaagactttgtaggacaaaaaggtctcagaaatatttcaagcagctaccttatactagaagcatttccagctgtaactgtaccatcattctccttgaaacttgggcgaagtttctttagttttactgggtcaaactaagacacaaaaggaatagcacaagacataaataaaactgtcatgcattgatcttacaaataactgctagcaaagctcattatgcgaggaacgttgcatttggaggaagcaagaacaataaatcaaagtgcctgccagtctttttgcctttgatcaactacaagctttattttgttaaaaatattttgtcaaatcagaaaaaaaaccttatccaggctttcatctctctcaattaatgttgggggttttcctctaccaacaggaacttgaacctgggcgacaacattgaccatcagaaaaccaagaaaagcatgtctagtatcatcaatgagggagaaaattaccggaataatctcccatgcaaaagcaccactgtcacgagcagcaattccacgctcattgctttggatagcaaatgcatcctattcaagaataagtaaatataccagaaattgggaatatatttattgcaatatagacaaaaatacattgcaacatataagtgaaaattcaaaggcaactcaattttaattatactatatcaaatttattaagaaaaaaattacataaacagatacagtaaaatcatcaaggtactagtgtcatgtactgatgagcagcttttaagagattatacttgtatagctctaacaagaatgcaaaagagtgctcatttttgtgtggcacatctactttcatctctggaagcaaatgaatggtcagttcacagacccagagcatgcataagcccaccctatcaatcatgtcacaacctaacagaaaatcattgccagaaaggatccaagttactagttcatcggacaaggaatgcagatgctggtctagagtctctagaccatttatgatgataaccaagataaagcacgaagattccagggcactctcaaaataattgccagcattgacatgttgtatagcacaacttatatcttgaaaaatatgggaatattataacaaacagcatttactgctatctgtattaagagacctggtcttctcttgtgagggcatgattgtcagcacaaagctcggcacacattcccatggcacaatcattgtatacatcccaaagcccatccttaagcatggcatcaacaagtgtgtcatgaccaaaacgagaccccttcctgcaattgtaagtagcaagcttattggattaaagcagttgaaatgcactttaaacatgaacagaatatactttcacaacaaaactggccacttcgttaatagcctcgctgctggtgaatcaacatttcttacaaacaaatttagaaaatgcaatgaagataagtaagcatgcatgtatctaccaaataacttaagactatcatttggtttatgcagctcgatattgaatatatccaccaagtaataattgcatacctagcttcagcaatgtactttggggcattggacatgctttccatgccaccagccacaacaatatcattgatacccaattgaattgactgtgctgcaaacatagtagctgcatataggaaagggaaacaagagcatggtcaggtaatctctcacttctgtgaactctgagcagagtacacaaggacagacagataaattcgattcaaacctttcatgccagatgcacagactttgttaacagtggtgcaaacaacagagtttggtatcccggcacccagagcagcttgccttgcaggcgcttgccccaaattagcactcaagacgtttccaaagtagacctcctgcacgagggctggatccacgtttgctctttccagagcagctaacagcccccagccatgaccatgttcagagctcggatgtaaatgcagagaagattcggatctcaccttgaattactatagagccaagtttcgtagcaggcaagggagacaaggcaccaaggaaaccgcccattggggtgcgtgcaaccccaacaacacatacatctgtgagcaaggaagaaaaagttactgactgtagaacaaagcagaaccatctagtgtgcacctcacagtatatctatagtactaatttgtaaaccgcgctcaaaattccatctgatggtacaaaccaaacacacatgaaaagcacatactgtactagtaccagtgaatcacttgttccaaatggcgctataacaacaatgatggcagtaccctctgtgcaacccgaaaaggaaaaaacacaacttgtggtaatcatataaacgtatttcgcagtagcaatgaactttggaaaacaatggattcaatcaagcaaacggacgagatcacgagcatggagcagctaggatgccctaatggatgcagacaggcactagaattaaacagaaaagcgtcaaatttcggccttgcaaggtacccaaaaaaaagcaagaattcccaatatgtcagatcgctggaagcgcaatggcgtgctcattacccaaaatctatatttgtacctcctctcggcggcttgacgtctgtctgtttgaacacaagaagagatgaaacagtaatacctctggggccgatgccgtcggaagccatggccgccggtccgaagtgccaaaaccaaccgacctgcgaatcaggggcgggcccagtgaaaaatggtcagatccgaatacaaatactagatttggggagttcggggtgtttgaattctcgcagaaggagcagaagggacggcatacctggaatatgctgtcgccggcgaagcggcctgatcgaatggcgtcgccggcgcggcgctagggaaagaaaggcagagaaagacagtgtgtgcgcggggggcgctggggacaggttgaagcggaggaagaaaagagcaagtagggaacgcaacacccaacagccaaatcacccgaatgtaatttttcctaaatctataatctattttattttttaatctatacaatatatagatatataataaaattaataaatcataaaaattaaagctgaatcagagaaagtactaaataaaataggctttatgttaggcaaaaaaaaagtaaaaatagaacaattcaattcactatatgccactgtaattttgtgtaataccttattcatcgtacctcgtatgttactcgaattcaatatctcactcttacatgtcgtggccaaatgttaaatgtaaaatgttgtatgtcttagtcccttactatgtcatcaacgatgacatgaaagagtaaaaaattgtattcgggtgacgtaaaaaggattagaacatttatgataacaaataagatactagatgagtgacatacatgatataattttatctctaaacctaatgaaactaataaaaaatgtcaattgatatcgtttgcgtttgctaatcacctcgaacaatcatcctcgtgggcatgtggttaaggctagaaaaaaaacttgaggctcacgagtcagatcaagttcggagcgtctgcgagcgagctagctcgtgagttgtaccaaatctctactaactattaagggggcagtatagactgcccccgccgcatcccctcccgcccgtggataacgcgaccgccgctgcgattctcctcgccccccaccgccgcgattccccaatcgcccgcggatcacgcgcacgaccgcccatcccgcccgtggataacgcgaccgccgctgcgattcccctcgccccccaccgccgcgattccccaaccgcccgcggatcacgcgcacgaccgccccctcccgacgcgattccccaaccgcccgcgatgaatccccgctacgcccgctctcaacaacctccgcctccatcgccgtgcgtctcggtcatgaaaacaaaccgcagcgcccgactccaggcgcggttcgccctccgcacgagctccctcgacgcgtcggcgacagtgacgatgacagtgaacgggtctgcaggggccgcggtggagaggaaggagaaggtggaggaggataaggacaacgagggactgccggtgaaggaggagcaggagagggctggaggtcctctacgacgacggctttggctccgtgaccgtcaaggactacttcgcggcggccaaggtcctgtgccgggacgatggtgggccgtcgtgctgattctctcccgtcgagtgcggccaccggccgtggaccaagcgtcgctgctgctcttcttgccaagtgcgtgcgtcgcttcagttggccaaaatcagtcatcccaatgcttgtctctgaagggcagcacgtagctggaggtgctgggcaaacggagcaggagagaatcagtatgcatcaatgcatcatacacagccaaattgtgtactaatacttcatctgcatttaccaggatgcaccatggaggggtgcaggtgttgctgtacccatgttttcaatcagatcagatgaggaccttggcattggagaatttctagatcttaaacttcttgttgactgggcagtcaatttgggcttccatcttgttcagctccttccaatcaacgatacttcagttcatgggatgaggtgggattcttattcgtacaggtataactaatattcgataccaaaggtttcctgctcataatggttgtttttcttgaaatcagtaaggacgttatctaaacagtagtagtgcccctcatttgtgaattacagctccctctctgtgtttgctttgcatcccttgtacctgagggtacaagcactttcagatgcaattcctgtgttaaggtatacctttgttatgctttcaaatttattcattgtatgtcttggctgtgttatttttattccactaaatgtttgttactcacctcgtttggtacccaatttaaaatttactacaggaagaaattcaggaggcaaagaagcaattggataaaaaggttattgcatttgcatgttgtctttgactgttgtagatctctgagtaaatctttaatgtttggttatttcttaacttggaaatgacatgtaaattaggatgtcgactacgaggcagcattgtccacaaaattgtcgattgctagaaaaatattcaatttagaaaaggaaaaagtgctaaactccagttctttccagcagttcttatctgaaaacgaggtacattcactgccatttcgtttctcatgtgtaatcatggtacttgatttcctattccaaactgtatgtgataagctttcacactgctccaataggaatggttgaaaccatatgaggcattttgctttttgcgggacttctgatcacagtcaatgggatcgttttctcagttttccaaggataaggtattcagaatattattctgcatttggtacttgtatcttttctcccactatagcttgctaagaacatgttgttctattttttttatgagagcacatgtttatgagcactaagatggtttccctttgtaatgtgtttcagcttgacaaacttatttctgaaggtactttacaccatgatgttatacgttttcattactatgttcagtaccatctatatatacaagtaagtatttcctgttgttgtattgtcgttctgaactgctcatagtactactctcatgtatttatttttgacattatttttttatttatctgaggcagcaacatatgcaagaaagaaaaatgttatcctgaaaggtgatttacctattggtgttgataggaatagtgtcgatacttgggtatagccaaccttgtttcgcatgaataccactactggagcgcctcttgattattttgacaagaatggacaaaattggggttttcctacatataactgggaggagatgtcaaaggataattatgggtggtggcgagcttgtctcacacaggttatttaacgtaacagtcgtatttctgactggtcatcttttccttttattattcatatcctactagcatcgcctccgccatgcatcgcagtccacgcgctccatctgcgtcggctctccaactttccacgccgccaacaaccaatgtcgcgtctgctgcccctgctgcccccgcgtcgcgtctgtgtccatgatgtctgaagtttcgcgcccctaccccctcaacctccatgaatgctgtcgcgccagcgcccccctcccctgccccacgagttctggtaagccaaacaagtggcagttaatacctcggtcctcgtggcgacagcggaaactcctcgctccccagccggcaaacgccagcccctgcggcggcgcgatccctggcgtagcctgtccgccggcgcactcatcggtccctgctgtccacgcttgcgctcccggtccccacgcgcggtcccggcccacgcggtcgcgctgtcaaactgatttccttatggcaccctgataaaaagcgtgctaatttttagaaaataaatgttaacatgttaactggtctgataggtcctaggatgattttaggtgtaaggaactaatcaaaacaccaagagaaataaatacgtggatggcagctcttgttttaatcttgtaacagtgtttttgctagactcaactatttttattaggtgtgttcctgggcaaaaaaacaagcttaccttgtgttgcttattacttaacttatcttcatattttggtctttgcagggtggtgcagtttcactaaaagaagctacagttcctaccccacggttgatcagctcccaagaacttgagtaattttttccttacttctgaaagcttccttgtcctacatccattaagcttctattttattttaaccagtcttgacacagtttccaaactgttatttgtcatgcaggttcttcaggcctcacattgaaataaagcgcgatcgtcagactagcgaagtttttgaagtacttgatggtttgatgttcaaggatggatttctgtataaaaaagttgcacttagttctttgatttattgggggatacaaccgacagaaacagagcttttgaaattctcttctaggatacaacatatattctaggataaaaagtaagtgtttcttgttttcttctgtaatattttctgcatgtaagtacatcgttctgatttccttcataatacagctgaagggccttacaggagcaccagagaacaacttttctctattgggcagatgctgcgcattagaaagggtcccttgaagggctacctctgtcgagtagttaggatatttcggaatgatgtgactgttaagctagactctctactaaaaattgttacaggttggttagcttacctattgttggacttgtttgtacaatgactgacttctccatgtgtgcagtacaagctgatcttctttcagtcccagctaatagggggtaagcaattgaagcatgttttagttttctttcctttgccgcttatgctgtaaatcctgtaatgcaattgcaccatcactaggccaaagtatggtatcacttccagtcttccatattagcttctcactatgttacatggcctaccagggataacttgtctggtgctccaactagggcaacaataacatatttgttccaaatttgaatgtatgaatacaacaaatactgcaatgaatatcttctcagtaaccatcgaaggacaaagcattaatgcgagtggggctgaccgaagaaaaattgcaagagcagattgtgccagttcgtcgctaaattgcaacagccatactggtctgaaggacaaagcattaatgcgagcggttaatttgttgttttgttggagatttgaggtcactaatgttattagacttgtgaccagtatgacgtctccaacatggtactgtcgggttttgtctgtgtataattgaagcagtaagcctaaaataggtttcggttgcttggatttggatggtaatggttgtgaacaatgtcgaaccttcagattgcagtaaatgaacatcgtttgatcggagagctcatgttgagattcatttcttccttatctgcaagtatcagtttatcaccaagtcatcttgagttaatatgatgtaatcttgttcttgcttccaggttccttgagacaaaatgacattttgcttcattatttcattttaaaatttagaatatgttagtacgacatagaaaagatcatactacttttaatcgactgaagcattcatcaactgaagatggttctaaaagcacgttataatatttactacacacttctaaccacagaaactcaacaatgattaaaaggggtgcagtaaatgctcggagaatttgagaaaaataaattgtttggtggaccatttaaccttctaaaaatggatagaaattgattttcttgcagtagggggttacaagcgtccgcgagggagagagagagcctgtctgtcagcccgtcctcccgcgcggccacctcctcgtacgagggtcttggacctttcttttatagatgtaaggagagggcccaggtgtacaatgggggtgtagcagtatgctaacgtgtccggcagagaggagccagagccctatgtacatgccgatgtggctgtcggtgaggtgttagtgccctgtgcatgtgatgtcgtggccgtcggaggagcgcttgagccctatagaagcacatctgtcggggctgtcgggttcttgctgacgtctccttgcttccgtaaggggctgagaaccgctgtcgtcatgggagcatgtggggtgccatcattacttgtttaccggggtgagccagatgggacgccggtcttgttccccgtagcctgagctagctaggggtagggtaatgatgtaccccctataacgtggtcggtccgagcccaaggtcgggcgaggtggtgactcctccaaggtcgagcttgagtccgagccccaaggtcgggtgaggcggagaccgtcttccgaggttaaggttgagtccgagccatggggtcgggcgaggcggagaccgtcttccgaggtcgaggcgggggccgagccctggggtcgggcgaggcggacaccgtcttccaaggtcgaggcgggggccgagccccagggtcgggcgaggcggagcttcctatggcgcatgaggctggactcggctgctgtcagcctcaccctggcgggtggcacagcagtcggagcggggcaggcggcgctgctttcctgtcaggtcagtcagtggaggggcgaagtgactgcggtcacttcggccctgccgactgaggaacgcgcgtcaggataaggtgtcaggcgatccttgcattgaatgctcctgcgatacggtcggttggcgaggcgatctggccaaggttgcttcactgcaaagcctgcccgagctgggcctcaggcgagttgaaggtgcgcctgttgcttgaggaggccctcgggcgaggcgtgaatccgcctgggtctactattcctgcccgaggctgggctcgggcgagacgagatcgtgtcccttgagtggacggagccttgacctaaattgcgcccatcaggcttttgcagcttgtgctaatggtgattaccagccgagtttaggagtcttgggggtacccctaattatggtccccgacactagcgtactcccgttgcaacgcacgggcacacacctagttaatcaatatgtagaataatgatggatattagataatttatagatagtcggcttatttcttagcctttgatgataaatataagataattcataatggtgaataatatttttatattttatgtttatatattaataatttactatataatgaaataatatatatcggggtgtagctcgcgagccgacttcgagctgagccgagcctaactctctagctcgtgaaatggacgagccgagtcaagctcggctcgactcattttctacttgtggtcgaccaggtctaggtagtcatgaaccgcaaccaatctgtcagttttatcgattgttttagatcatgttaggcgagtgccggcgcttggctctactgcccacccacccatgtggcacaactgaatggtcagtatcacccgacatggtgccagcactaatagcctcgcttgtggttgtcgaggctactgatcggccgccagggttactattgaccgtgttgggaccgcgtcggtcgatactgactggttggtactgaacagctattgcggccatgtcgataacgatcgcctcttgccatgtggcaagttctaattgcttcgctttattttgattttttttcaaaaataaaaaaactagaacttggtctataaatagaggagtgtttgatctcattcacacaacccacacttcaaatttctctaccaccccttataatcctcttacactcgtttcagtcaaatcaagcattgttgtgatgttttcgttcagcttggacatcaatatgactcaaaagagttattcaagttattacaacaaaatataatgcaacaggcgtcagagcttgcatccgagtctcctaggtcgatgaggcggccaaggcaacatcagagatacattgactgcgactatgtagctgcatacgaccggttaatgcaagaccatttcaacgacctgtgtgtctacccactgctctacttttgtcaaagttaccgcatccagagaagtctcttccttcatatcttagagagattgggtgagcacttcccatacttcactttttgaaccgatgcattcaaccgcagtgtttcctcccccaccagaagtgcacaattggcctaagcatgcttgcgtactgtagcattgctgactccatcgatgagtacatcaaaatgaggaaagttccacctcagagtgccttggactattctgtgcgaaagggtccctagttaagttggttaggtcgtctgagtagcactcctcaggtcctaagtttgaatcccggtgggagcgaattttaggctgaggttaacaaggtcactcactagtttccctagttgtgtgcacatgagatgggctgacctatggggcggatcctcgtgtaagggctagtagggctcaaagcacgagtaaagatctggcctatagggggcggactctcatgttgcatggggggaggggtacatctttcgtgacctttctcgatcagggctccgattaagcttcttcttaccgtgggggcagtatttcccctacgagtggagtttttggtctattctgtagaggtgttattgcatgtttcagggcggagtacaattatcatgccattgtcgatgacttaggcttatcttagctaaggaggtggaaaggggattttctgttatgatattgagtatagattgcatgcattggaagtggaggaagaagacattttacaagggggatattggttctccagccatcatgctcgagacagttgcctcgtatgacttgtggatctgacatatttttatgaatctattaaaatgctaaaacggttaatattttaggacggagggaattattttttggaatatttttgtagcaacctaaacatagttcatctatgcttagtttgggggtgggatggttaggcctagaagctaccgttgaattaatgagggcctaacccaaattaatattcaataatagtcaatgctaaaggcccactttaatgctacggtgtatagtactttagtaccatatcggaagtacaagggacaattcaatcaacttaaataggcggatctttggtgcatctattgagaagttgagaaaatgatgaaggactgccacacgcgcgcgccgccgggccgtggccgtggtagatcggaccttggtccgaatattccttcctaacggttgcacattttgcctaaagtgatgaccgtccattactgttgtacattattggtcgtttcctatgttatggatagtaacgaacgagctataatgcttgtcagctattaacggacgtcactaatggcgtccgtttctggctggctgtaatgatagctctgatggtgaccgttactatccgttggcctccctctgctcgtttatatatacagaggaggtgaggctgcttctggttacgagagaacatacgtacaattcttagaagcgttgcgtacagcccatccctggttgaacctctctaaaccccggttgaacttttcctggaccccagttgaacctctctggaccccggttgaacttgccttggaccccggttgaacctgcctggaccccggttgaacttgactggaccccagttgaagttgaagttcaactggagttgagaaagctcaacacagctgaagtttagctcagctgaaaagctcaactgcagctgaagaagctcaactcagctaaagtttagttcagctgaaaagctcagctgcttttcaacaaaaacactctaggtttctcaaacctaaccacagtcaaccatagaattttaaagagatttttgattttcaaaaaatagcttttgaatatagaggcttgagctttggcaaacaccaaccttatttttggatccccttggtagtacgatgaatcatatactcaattcaagtaaaatataattaattaaactccttgagtaattggtgtctcatgtgtgatttctccatggcgttgcttcataaggatcacaaacatctttgtctcaccttttgaagcaaacgcaactcaaaccctgtgacttgtaccatatcatcatatatgagttcaaatcatggcttcaagtcaccttactgatgcatcaacatgttataactcttcatagttgattagttcatcgacttagtgcaagtactctcttcttcaccttagccatggtacctcggtctacaagctgtcgcttgtccttcaccttcgcttagttcctcgaagccctttccttgccatcttcaccctatcaagccattcttgaatcacatcattttgagcatccattgagagaatcatttcttaaatattgtgaaccttgcttgaatgtcttctagatataactgttaagattaatcaagctctagtttgattctcatataagcatatatggactgatattaatatggtcaagccaattcacgattcctcatatcttattcactttggcttgaccaatcctcttaatcacttcatcctctattctgatcatatgtatgtagtgatttctcaggtcttgtccatatatttaaaccaatatagagatcatattatatccatttgcattgtcgcactggttatttaaccttgtgttgaacctttgttcacgatcattatacaccattcaagtatgttcatcatactgaatttcctgttcaacacttagcaaacttgttagtcttttaaatgtgttgtcatccaaatcaccaaaactcacaaaagggatgaatgcactttcacggtattatcgctaagttgccaccttcttggacggattttgctaccactctaaaacataagagacaagagtttagcgtggttgagcttattgggtctcttgatgttgaggagcgggcgagagcaaaagacactcgcggaaaaggagttgagacttctagtgccaatatggtacaaaggaagaactccaatgcgtcacataataataaaaggaagaacaagcaacagaatgccacgaagcccaaccaggaaacctcgtttaagaagaggaacaaaggagctggttgctttgtttgtgggagtactgaacactgaccaaacgcttgtccagaccgcaaatttaagcaagagaaaaaaccagctcaagagaagaaatcagtaaacatggttgttagcaagaccgcagaaggaacatcggggtatggtaatattttacctactgttctttcagtgtgtcaatcccctgagtggtgggctgacactggtgctaacattcatgtgggtgctgatatttctttgttttcttcttatcagtgcaaaggggctggagccttgctgatggggaacatatcacatgtgtgtgttcttggtgttggtacagtcattctgaagtttacttcgggaaagacagtgctattgaagaatgtgcagcatgtcccctccatcaaaaagaatcttgttagtggctcgttgctatgtcgagatggctataaacttgtattcgagtcacatttgtttgaaaaagctatgacagtggaggcttgttccgcttatctttgcattatgtttgtaataagtctgtgaacaatgtgatttcgaacgagtcgtatatttggcattcatgactttgtcacataaattttggttgtgtgtcgcggttagcaaatttaaatttaatcccgaaatttgatttagtcaaaggttctaagtgccaggtgtgcgtgcaatctaagcaacctcgcaagcctcataaggctgcagaggcgaggaacttggcaccactagacttaatacattccgatttatgtgagatgaacggaatattgagtaagggaggcaaacgatattttattacttttatcgatgattctactagattttttatgtgtatctcttaaagtcaaaagacgaagctttgcattattttaagacctacaaagctgaagtggaaaatcaactcaagaggaaaattaaactgttaaggtctgatcatggtggagaatatttttcagttgattttttctgatttttgtgtggaacatggtattattcatgagaggacaccaccatactcaccacaatacaatgggattgctgagagaaagaaccaaactctaattgatttggttaacgccatgttagagacttggggactatctaaggaatggtggggtgaggcgatcttgacggcgtgtcatgttctgaataaagttcccacaaagaacaaagaaatcacaccattcgaggaatgaaaaagaggaaattaaacatctcctatttgcgcatatgggttgtttggctaaagtgaatgtgctaactaacaagaagcgcaaactaggaccgaaaactgttgattgtgttttccctgggtatgcttttcacagcattggatataggttcttaattataaactctggagtaccggacatgttggtaggtactattatggaatccagagatgctatgttctttgaggacgaatttccatgaaagctatacataatacgtctagtgatgaaccaatgataccccatgaacatattatgtagaacacactgaggaattccatatacataatcatgtggaagatgacaatgtatcaactcgaaagagtaagagaccaaggattgtaaagtcatttggtgatgattacattgtatatcttgtggatgacaccccaagtaccattgaagaggcatattcctctcctggtgctaacttttggaaggaagcaataaggagtgagatggattctattatgtctaatgcaacttgggatgtcattgagcgtccttatgggtgtaagcccattgggagtaaatgggttttcaataaaaatcttaggcctgatggtactattgaaaggtacaaggcgatgcttgtcattaaaggctttcacagaaagaagttgatcatttctttgatacttattcgcctgtggctcgattgaccataattcgtgtgctactttctctagttgcctctcatggtattctcatccatcaaatggatgttaagacaacattcctaaatggagagctagatgaggaaatctacatggagcagccagctgggtttgtagcaaatggtcaagaaggcatggtgtgtaaattattgaaatctttatatggcctaaacaagcacctaagcaatgacatgaaaagttcgacagaactctgacatctgctggctttgttgtgaacgaagcagacaaatgtgtatattatcggtatggtgggggcaagggagtaattttatgcttgtatgttgatgacattctaatcttgggtacgagtcttgaaatgattaaagagacaaaagactttaattttgaaatgaaagatttgggagaagctgatgttattcttaacattaagctactgagagaaggcaatggtggggtcacacttgtgcaatcccactatgtggaaaaggttttgagtcgttttggttatagcgaatgtgaacctgctccaacaccttatgatcctagtaagttattgaagaaaaatcgaaggatagctagggatcaattaagatattcccaaataattggttcactcatgtacttagctagcgctacgaggcctgacatctcgtttgctatgagcaaacttagccggtttgtttcaaatttgggagatgaccactggcatgctcttgagagagttctgcgctatctaaaaggtactatgagtttaggcatccattataccgggtacccaacactatggagggttattgtgatgcaaaatggatatatgatgttgatgagatatatgccacaagtggatatgtgttttcacttggaggtggcattgttgtatggaagtcttgcaagcagactatcttaacgaggttgactatggaagcagaactcacaacattagataccacttcagttgaggctgagtggcttcgtgaactccttatggatttaccagtggttgaaaaacctgtgccgactatttctatgaactgtgataatcatactgtgataatctagataaacagttctaaggataatatagacacataaagaggcgtttaaaatctatcaagaaattgagaaactccggagtaatagcattggactatgtccatacgtctaaaaatctgacagatcaatttactaaggggctatcacgtagtgtgatagatattgcatcgagtgaaatggacctgagacccacctaaagtttatcatagtggtaacatgttctatgtgatcgaagatcccgtgaattagaatggtgaaacaagctagtggtagactgagaggaaagacccttaataaggttcattttagatgcacatctttccttgttgtaaggtaggttggtgtttacaccttaatatgttccaagtggctttgtgaagcaaagatgttatcctacagaacatctttagaggaacatacctatatgagttaactgctagtcacagttatgagatctaggtggtctctagatacccatgaaaggctatggagtttgacttatatgctccaaccagaagggatgcactcgacaatctagtactggtaaagaggttagatgaaacttattccacacaaaactacaaattcaaggcctagtctattgtgcatttgtggtcaagtgcaatctagattctaggtggatgttcaacttaacagtctccatcgaaacaccaatatatcaaatgtttgagataatgagagaattttagtgtgacttagcatttggtggggatagttgaattaaggagggcctagcccaaattaatattcaataatagtcaatgataaaagctcactttaatgctatggtgtactagtagtctagtaccatgccggaagtacaagggacaattcaatcaacttaaataggtggacctttggtgcatctattgagaagctgagaaaatgatgaaggactgccacaggcgtgcgctgctggccgggcagtggccgtggtagatcgaaccttggtctgaatattccttcctaacggttacacattttgcctagagtgatgaccatccattactatcgtacgttactggccgtttcctatgttatggctagtaacagacgagttgtaatgattgtcagctattaacgaacgtcactgatggcgtcagtttctggctggctgtaacggtagctctaatggcgtcggtttctggctagctgtaacggtagctctgatggcgactgttactgtccgttggcctccctctgcgcgtgtatatatatatggaggagatgaggctgcttctggttacaagagaacacacatacaattctcagacgcgttgcgtacataccatcctcatcccaccttctgcgagcacagagaatgtggaagagcagacctccgaaatcgcattccgcatagcgacacttgcacgggtgtgcgggtgatcaggtttttcgggagcgtactcgcgactgctcgcttcgtccacccgaccaacgctgatcaagttcctcgtcgccagcgccgttcgagtgactgcactgcgtacatctgcctgcatcgactacatacgactacatcgaacatacacacgagatgtctcgtgtgaatggagccactaatggcttgagcatcggtcccttcgcagggtacaatctgttctttgtatttgtgaatattttattgttatttactgattatgtgggtagtgatacacatatacacatacatatcgtcacatacatcagtatgattttctggattaaattaaaactgaaaatgactatttcttcaacagctacaactgcattatattgcaatcaactctattgtaccccatatctctactactacttaagtgtctatcgtaggtgtccacattggccagtgatgcacggttttgccggttctgcatcccgcccgcccgccgcgcttctttccatcgatgtcgtcttccccacgcgctgcgcccgcctgccatcgccagcgcgcccctcccatgctccctctgcgctccgtccgccccagaaaccgcgtcgcccacttccatctatggtagaatcttccatccgtaaactgtgcctccgccaggtggcccttccatccgtaagcccgcaatcctcgcccccaagggaccgcgccccgccatcttgccaccgagcccgcaatcccctccatctgcacccttcaatcagccgcacgccatgcccccgccagccccgcccccgcgacaccctagcctccaaacctcgtccgctcctcacgagattcccaccccccttacgttctctccccacgccgccatctgcacggctctggcatcctatgctggtctcctccagcctcgctggctcctctaccccaaccctcaccacggcgtcgcacgatgacctcgaaggggcacgctgcgtcactcctgtgtcctctccggagccaacctgaacgccgacgtcgcccgtcccatctccctctctccggaaggacacctcggtggccaacacgagctgcccttctccagctctgccccctagtacgcgccgatgtcgagttcagccctgaggatgccgacatgtacgtctctttgcagttttatcttggttcgtatggccggtttacttgcgcaaatgaaatgcaaaatgttagatcatcataggatgaccttaaacctttgtactaattcacagacaaaggatctattttcccctgatgcgcttaaggctgcggcctgatagatttcagtttcccaattaccatccaggtcaaatcgagaattcttgtaccatatactggaggaagtcataaaagttggggcaaccactcttaatatcccagacaccgtcgaatacactcttccttatgaatttgggaagttaatttctgacataaaggaaaacactcttagaattgaaaatgccatcatttccactcattgccagaatggccttggccttgcaactgccaacacattagcggtacataccttctccttatttgattctattttattatcattggtttaatctttaaccgggttactaatttgacttacactttagggtgctcatgcaggagcgcgactgttagaggtgactattaatggtattggtgaaagagctggaaatgcttcattggaagaggtgagctcatgtacttgccatattatatgatgatataccttatgaagtaatttatgatggattttcgaaaggaatctgaattgatttgatagagtgtttttgcatgcctaatatttctgatctcctgttcaggttgtcatggcaattaaatgtcgtcaggagctcttagatggtctatatacgggaataaattcccaacatattactttgacaagcaaaatggtacaataattgtccttgtttgtttccttttctatctcgcttgaatttttcagatgactgaaatttctggcgcaaatgctctaattattctaggtacaagagcacaatggacttcatgtacaaccacatgaagctattgttggtgccaatgcctttgcccatgaaagtggaattcatcaggtaaacatattcagtccctttgctgccatgaaccttttgggattgtagttgtggtgggttgattgtttcgaaatccttagcattgatcctttttgcttctttagtaatttgttctcaacttttagataattattttcacctttgctttgtgatggatcaatgacgacttcaccttgcatcattgttctgaacctctgagatatatatagtttttttgtaactgtctaactgatgatctcaatgatgtatgataattataaactgtgttggttatagattggaatagttattcatgttcacttttcttttattttatcatattttttacagggtggaatgcttaaatataaaggaacatatgaaataatatcctgatgatattggtttaacacgtgcaaactaatttggtattgttcttgggaaactcatgtattatgcaacctacccataccctcttgatttagacttcattttctccaatattttactgtgatgtctctcaattagatttctcttaccgactttctactttttacttttgtttgatggcatgcatcctctaactaaagagccataaatgttagatttgaatgctatgtatttggctacaaaataggtattaactgttggcgatgttcctattggtagtgttacaaaagtattggtagtagggtaatgatgtaaatcattacacttaagtcatgtcacaggcatatagcctctgattcagtaattatgcaatgatatgctatataggattggaaacgagctgagcggctccgctcggtgcgactcgatggctgatcgagatcggtttggctcgtccattgcacgagctcaagaatgaagctcggtttggctcgaagtgggctcgcgagccgtaccctggtaaatattattgtattatagaataataaattaaagtatatcaatgtgaaatataaaatcacccttcaatattatgagtaatctctactactacttaagtgtcataaatgtttgacataccataatttgttgattttggggactagaagggtatagacctctactacttgcaaagtcagcaaacaatgtagtcgtctagggcagcttcttaagcaattccccagggatctcttgcctctcaagagagcccatctcatctgcttcgatatgggaaagccagatttgtccctaaaattcgttcaagtaagccaaatggggttcctatgtatttatgggcttcaaattttgggcttgactgaaggaagttgaagccgatgtggcatttcttttttgcttgaggtacttgtgttgattcttcccaaggaatatcaataatgtcatctttgtatcaaaggtaagatccaaattgctgagagtattatatgtcaattgttccataactgcacgattgtctcttgttaaagaaataatgtctatttgtgttccttttcatcgtttcctgtgaacattttattgtgccaaattggtgcattgcaaaagcttgcgaatgtaccaataatattttttatcaacccagcaccctgccacccgcttttatcaggctcttttgttcactggatttgtggtactcattgcttatgatgttttgctaaagaatcctgatcagaatttcatatatggcaatgcttgccttccatttgcttgagcttggacggatatatgaagctgagagagctgctcaataaaaatgacttctggtcacatcataatgtatgtccttgatgtggttgtagttagtttcagttgtgaaaagcatatcatagcagcctttgagcagattaagtctttaacgaccagtcagacaccaatgctaattgtttctaggttcttgaggatggggttgtgtgattttactatctatcgtgttgctttagaagtagatgtgattgtgtttacttcaagaatgttcatacaatgtagtaacttattcttacatgatcaaatgtttacagctgactgtactagaaggttccttttgcaacctcaatttgagatttaagggaggattaccaccagaggcagtatacaatatcataattgatccaaagaataaaagggtgttcatgattagtaatgtgtgtacatgtgtgcttttactattcagctttaggcatgattttttgagtgtctttgtgtttactctttcatgggaacatttttactgtgccaaattggtgcgttgcaaaagcttgtgaatgtatcaataatatttttatcaacccatcaccctgcaccctcttgtatcagactcttttcttgttagagcagttgttgcattcgtcttgataaagagagatcaatgaaaagatgcactgcgagaacactagacaacactagccatccaattcattcccttcgaatgaagttaaaggtgggtttatatgacactctattcctaatttgatgtcttggtttatattgtgataggctgatggttatacgattgaagtggattgttttttattttttgagcacccattttatgtttttcattacagctatgtaggtttttgtacaatactccctccgtttcaaaatagtagttgttttagctctagatttttatgtttatattcatatgtatgataacgaatcttgacacatatataggacacatacactaaaaaggtaaaacagattttaatttgggacggagggagtactttatagtggttctggccttcttgacaccatggtgaagctaacaatgatagctcgtgtcactaatggatgtccactagcagaagggttggatgatgggcgagattagaaggatgctgatttctataagcagcaagctaaacttctatttaagaacttgtcaaaagggcatcatgaagcttcacgaatgtcaactgagacatggccctactatttccattatccttgtgccatttatgatccttatatgtatatgtatatgtatgtatgtttgtgtatgtgtgtatatcagaattaggcttgcttttacatgttgctcctcatatagttcttttgtttgtctaatttccagctaaagatgatgcgtccatttgtaaacagttgggattccactgtggctatataaactgctttatgtaattgtctatttgtgtatcacaccattgtctctttaattgcaagaatacgttttgcaggcattcctttttccgtttgtgattcttcatttcttttcatttttattacagggctagcaacataagttggatccaaattataatgttatgaagactctacaagctttactttttaaggaatactaggcgaagtctcttcaatacacgatccaagggctcatggggtcttagggtgctgcaatcctctcaaaaattttgatctggtttgtgttcagctagaggatcctctgttctcaccatcacgtttggcttcttttctactttgtttcatgtttcatttctttgtacttgtcctggcgttgtactgctaaagcagccttgatgataaagtaatagtagcaataaaattttcagaagctactagaatactatgcaggctctgggttgtcttcttatatgttcttgatgggccaaaggattaggtcctttttttcctcctaccaacacttttgacaatagctcttagatgatgtagcaaaagacgttttgttctgatgatctttttgtaactggagagattgtatccgtgaacagaagagttgcttatgtacaaacagagatactgtaaatcgctcgaagaaatccacttctcaactgacaattcccaaaaatagactcccaattttcttgttttacatgtatttgcagtgcagaatgcctgaaatttgaatgattttgctaatatagggagctatactagactccgttaaaatttgattttgcatttgagttcatgttatcctgttacgaaggaccaagtggttggattgttcaatggacggttttcacggtgtactgtttggcttttgaacaacggtgtggttgctcttttatgtttattgcataggtcataaactgaacaacattacaatggctcttatatgtttactaggtatgtgtatgtgggtttccacgggaattaaaagatatgaacgacaaacatcaaaaactctagccttgtaactttggtatatgtttgtcgtccaatgagaggtggtttgtcacaacacagaaagctcttaagtgctcttaagattgttgcatatgctgattgcttctagcagtgaatcggaaacacagtatctctagcatcacatctggtaggacgcatggacttgggctggcccaaatgacatgggcattgtcttcgccaagtttggacattatatttgtatgccatcgcaatgcatgggcactatactagtacttgtatatataaagagatcgtcactggccggtccaaggagacacgtatggtaggctattctgattgacagacacacaaggaatggataaaccattgtagagatcagtaaaatatatgaggcaataaattcgttgtgcgaacagaagaaaacgcacattggattttcatcgctcaagaaaaaggaggggaagagaagaaaaacaaggaacactaccggacatagctcctttgccgagtgccttaggcactcggcaaaacatataaaacactcggcaaacactttgccgaactgtacattggcaacggcctctttgccgagtactttttgtcgggcactcgacaaagactttgtcgagtgccatttggtactcggcaaagaaaagtcgtcgtcacggtgccaagtgacggtgacggatcctttgtcgagtgtcttcttcggcactcggcaaagaggccaattttgccgagtgcctgctatcatggcgctcggcaaagacggctccagtgggccccaccgccagtccctgtgccgagagctttcgtaagcactcggcaaaggaggcttctttgccgagtgtctagtggactggctctcggcaaagagtcctccagtgggcccctttgtcagtccctttgccgagtgcgctgggcgacactcggcaaaggtggcttctttgccgagtgtcttgaccacaacactcggcaaagaaggctttaccggttcccaggtttccttctttgccgagtgccaaggttataacactcggcaaagataccctttgccgagtgttacactcggcaaagtgaccaggaagtcccttttttatttgtttttgctgttccgtccaaacaaacaaaagatatatatcattcacatcacattatatatcattcgcatcacagaatcaacacatttatcatcaacaccatatatatcacaaatatcaccacataaattaggtttcacagcacataagtctcaataagtatctcacaagaccaagtataactaacatcaccaacactcacaaatataagtctggatcatcacaaaacaggtcatcaacgaggtgggcatctggactggttcggcgaagggctggacgaagcgtgagggttgttcgacaccgccgattgaccctgcacagggaagagattgcacgtgtgagaacatatgaatatatatcatgcagtactaaaattttgatactcacacgagtagtgaactcagcagggtcagctgcagggaacaacgaaggtggtggagcatgaccctgtgcggcgtcaaggctctacatgtacgcgaacatctccgccatcctcttctccagctcctcacgttgcctcctctcatcatctagctgagtatgttatatttcgccctaatgttacgataatgcaaagagaagatatataataatcaatgaacgatgaatagataaggaataacctggagttgctggatacgatgctgtgagctgtcctgccgaggtcgtatggctgggctcgcgctcgtgctcctagctcgcacctgagatagagtgggagtggaggacgagtcgattgccctgtcggcaatccagtaccgcccatgcctcttgcctcctccgaccctcatgaggacatctccgtcgatgtcctcggtcctcggatcgtaatctggcccgtggacctccttggccatggcggtgtactcactgaggcggctgtggacggcgaggttggtgtacgcctcgggcctgtcatccgggttgtaggtgacgtcggacgtcgccttccccttgtgggccatagcatatgccgagaacgtggagcaaggcgcgccaccatgtgccaccgactgcgagataaccaacgagatggttagaaatcatgtctaatcgaaagttatatacctaaataaaaaagagcgcgtacccatgcttccgcgtatttgcctaggctgcggctgccttgatggtgggagggaccttgcatcatcaaacgccgttcccggctagcgttgtgcgcctcgtcccactcagccgagcaccacctctgcaccatctgctcacagcactcaggatgcgcggcgcaccaatgaggaatcatctaaaaaaatacaagtacacgacatatcagaagataaaattaagcatatttagtaccaataataaagttttgtatttacctgcaagtactggtccggagtcaacgacatggttcgggcgtccttcttgctcaccttctccccaaggacggagccgtggtaagtgacgatggcctggatgcgcgcctcgtagtgcatgtccatgatgagcttcttacagctcgtggtagccaccacatccgccctggcctcgtatccagcctcgcatctgaagatatcctacatacaaagacgatgtatccatacattatttcaagaatatgcaacaaatgcgacttattaaacaatatagtgcgaggaagacttatccacaactcttgcttcacccgctccaccttgttgttgaattctctgccgtcccgatctattgcatcgggggcgacggcatagtggtcgaaggtgtaggctgggctcatcactccggcgtactcgacaagtccagggaagtgttccctgcatagaaggccgaggatgccattggggttgcggccgtgaccccctgcactctccaaaaccttccaagacctttccaagtgattaagataaagtattagtttctattattaatttgaacatataatatgaaaaagcagcaacaacatctaaagttacctacctctctccatcgggtcgtatcagcggacgtctgtcacgaagtatgggtcgctgagggagactcgtgggacctcgcaggtagatgctcctcgaacctgaggagccaaaacctgagacgtcctgctgagcggcatcatcgtcgtcgtcctgctgcgctgcatcgtcgtcgtcctgctgcgtcgcatcgacagcgacttgctgctccacctgctgctgtacgacgtcgtcctgctgtgcctcctcctccgtcctacgggtgctcctcctccccctccccctcctcgtcctcgtcccaccgcccaccatctttgtccaacaacctgcaattaagagtaagcaattaagcacatgtaatatgtatttagaaacatatgcaaaataaatgaaatatagcattacatcgattaaaaataatcttcatatgtgtccgggttagccggatcataagtgtcatcatcactatcaaccatttcatagtcaacaccatctgaaggcgcaatttcgtcattggcattgccttcaagcatttctaagtcattctcattttgcacctcatcctcctcctcatcaacaaccatttcaatatctacttccatttcgatcgcttcggttaagtctatctcaaatcgcgggttgtccaaaaaacgtggacaattcgaaactgatacatttgtagatatgcaaagatctgcatatctacaccgtatctctttcgaatgggagacacctaactgggttacgtgatctacgaccatgatgcggaaatagaggttatacctagggtggcggtggagtcaggctagtggggctgtggcgggtcggtgcagtggcgacgcgacgcggtgcaggcagacccgcagcggctaggaagacaagtatcttctctgtaaaaaagaatcacaagtatgttaacacaagtatttgaaacacgaattaaatattcaatgtccactatggatggttattgcttaaccacaacccactaataactagatagataactataagtataaccacaaccgactaaatactaaccacctaatactacccactaactactaaataactaagtataaatttttgacagcacctcccttacacggggaggatactaaaacctgcatattcaactcacattcatcacatccgatcaaattcgcatttatcacattcatattcacgatattcatacctaacaaaaatgctaacaaaactaacaaacaactaattatagcaacaaaactaacatacctaacaaaaatgctaatgacggtgctcgcgacggtgcggcgaggacacagctcacgacggtgcggcgaggcgggtgcggcgggcgtggcgggcacgaccgtggggagggggcccggcgcggcgagtggccgccgcggcgagcaggcgggcgggcgcctgagtggggggggggcgtgccggcgtggggaggggcagacgacgcggcggcagggaaaaaagagaaagaagagagcgtgagagaagagaaaggagaaagaagaacgaccggtagtttatttcctgactttgccgagtgcccgcgatctggcactcggcaaagatttttttaaattttaaaatattctttgccgagtgccagatcgctgacactcggcaaagaagcctttgccgagtgcccactgggcggcactcgacaaatatacttttacaattctttgccgagtgtcaaccagctggcactcggcaaaggcttctttgccgagtgttatttcttgacactcggcaaagtacatttttatttttttaattttcccaaccaaaatttttgtggtatgttcctacactatatagacctacatgtaccattttgagacgattagaaaattgttttctatagctagtagatttagttcgtttatttgaatttcttcgaaaaaaacacatttgaactgcaggtcactcgaaacttggaatatcgtgcatgcaaaaatgatatccatgctagttagcacaagttacgaccgatttcaggagcggaccggaaacttcgagcaccatgctcactcaacatggccgtgaacttgccatacagctgtttcaaaattttataaaacacaaacaaacttagaaaatcatgaaacttgtccacttgtcatgatatcatatgtagagtctgtgataaaaaaattagaatgtttggagaaatttgtgagacattatgtgtaaaaacctgagagaactacacatgaaatcatagagtttcaatgtggatctcttaggtttgtacacatagtgcgttacagctttttcgaaactttttcaaatttttatcacagcctctacatatgatatcatgacacgtggacaagtttcatgattttctgactctgtttgtgttttatacaatttttaaacacctggatggcaagttcacggtcatgttgagtgagcatggtgctcgaagtttccggcccgctcctgaaatcggtcgtaacttgtgctaagtagcatggatatcatttttgcatgcacggttttccaagtttcgagtgacctacagttcaaatctgaattttccgaagaaattcaaataaacaaactaaatctactagctatagaaaacactgttataattgtcccaaaatggtacatataggtctacatagtgtaggaacataccacaaaaagtttggtaaccaaaattaaaaaaataaaaatatgctttgccgagtgtcttcgactttttttgccgagtgctagatatttgacgctcggcaaagactgacggccgtcagctgtagacggccgctaacggccctttgccgagagccatctttgtcgagtgttggacgctcggcaaagcagtctttgccgagtgcttggctgtgccgagtgtcgtgcactcggtaaataagctctttaccgagcgcaggactttgccgagtgcggcgttcggcaaagtcttctttgccgagtgcccgataaaaagcactcggcaaaggcccggattccggcagtggaaggaacaagaaaaacgaagatagacaagtttctagctagctaggttacacaccaacaacaccaagcaacttcctcccaaccccactgttggtggctgcatggcccgcaccagggctgtgtccaggatccgtcgctcgggtgtcctctccgaggacgccgccgctcccggtgccgtcgtccggcgagactgtgccgcctcgggtcgtcattgctgtccccatggtgtccccagcggaatgatgtgacaacaggttaaacctcctatgcatcacccggaggggttgtttgcctcgagagtacatcatgatatggttagaggagacgaggattacgagcaccaggatgaaggctgctttgctagccttacagaagaccatggtacaaagcttagctacctagctagaggaagcagggccggcctacaatggcgccggtgatacctagcggccggcggcggaatgagggtgggtgaactctggtgtggctgggctgggctgatgtgtgtgagctcattttgttgctatttatagcatcgtactaggtacactgaagctgcgtgtgccgactagagctgcaatatactccatatatataactactaggtgagtgcccgtgcgttgcaacggaaacatataataccgcgataacttatctacaaatgtgtgttatactgttacgataaaagatttcgtaatctatttgtgatcctagccatacataaattttgttattttaatctagctatttcatcactacattacaaccattagtaccatgcaggacttagtaccatgcatgacttgctcgcctgctgctgcagcagcgtggccatctccagcttggcctcctcgagcgacatcttggtctgctctacctgcttggtctggtatatcagcgatagtggaggcggcgatctaggggcgaggagagcgaggcggcggggattacgaccgcgtgcaagatttggggacgaggagagccggggcggcagggattgtggcctcggcgcagggagaggagagctggggcggggagattgttgcgatgtccggcggagccgcggtgtggacgccctcgttacgtccttatagagtagtaagataattaattaatggcagttatgcaatcaaacagtaaacacttgagggcaaagatatatgcaactcaaacagatatcaagaagcacaaatatgaatagacaatagaggacataaccaagtctactgaattttacatggcattaaactaccaaatgagtcatttcccccatctttctacagcaacgcataaacatcaagatgtaagttgaaacttagaaagtaaagtgcattgctagagtttttacctgaatataatttgcaccatagaatgcattgttccctatttggaattgtgctcgatagtcacttccttgtacaaataagtgaagtgttgattcaaggaactaataaatgtatgataaaaactactcctagaagcaaagtaaaagtttgcctattacagatgctaataaaaaataatcatttacgttcaaaaaaactaatcatgaaagtttggaaaactacaattgactgacttgtcagaaacgtcaaccttgtagtcaaagttaaacattccttgtgagtaatgtgcctcttgggtaagctaggaagagaacaaccatcagtagaataaggaaagcaaagtatcaacgaaggaaaggatgaaccactgaacctaaactctttgatccatctacctgtgcatttactttcagcgtgagattgtctgtcaaatcacatttcacgcgagcattaagccttccatctgttatcacccttccaatgagcattaactacacatagtttcatgcacagaagcagatgagttaaggaataaatcattatggaagatgccacaataacaatgggtgacatggaaacaaacctttggatctaaaaaattggcaccaaattcataatgagcagttggaactttaatagtttcaggcccctgggctggaacttctaaggagcccataaaaacactgtggaagatgttaggacatactcgggaaaatatagcataagttatgtaatgatcttagtggacaggcctggtgcagtggtgagagctgtctcactgaatcaccaggtcacgggttcgaagcagcctctctgcaattgcggggggagacttggttcagtttatcccttccccaggccacactcatgtgggagcctctggccctaggtctacccttatgtaatgatcttacctgtggctaagaaaaaacttttgattcaacccttttgtgaagtcaaacctcaatccttcaaaaagttcaggcttcaaagacactacaaaaggagcatgtcatctgtcagcagagatcacgaaagtaatactaaagttatacagtagtgtgcatgcaccaaaaaatagaacatcaattggaccatttaggtttgctattgctttggtcatacacgaaaaataataaactacacagagcatatatccctcatccccagttaattgaaagggaactcaacaagtggataaaaatttcaaaatgacattctattattgtaatctaaattttgaacattactacagttcaatcattctattcaaccataacatttgtcttaaagtacttctcatctctttcggatagaacaatatttgatggagactacttaaacagttgaacttgactaaggctataaaagaaatgttgaagattttattggagctggaaaaaacagaaaggcagcttatgggatcaaactatatttatagccatttgtcagttatcaaagtatactgagcaatgcccattgccaaatatttataaggtaggagtaggaaccaagcaagttgccatgcacatcaaatcaaaacctataagaagtctgaaaagatcttaggcactactaaagatgtgcataaaagctcatgggtaagaactaaagagcaaagcagtttgcacatggacacaagaaaacagattaccccttcgcctaaattgtgttttctataaccagctaactaataatagaataccattcccttagtatattaaaaggccatatcaagtattcatacctatcaacctatcattattcatatgtgttgttggagcaaaagaaatagttttttgctccttgtttgctgattgttgccttgtagattgattacctggcgcatttccagacactatggatcgtgttggcacactcccagatactgtggtcacagctccctgaatcaagtgtgctcttggattggaatctgccatttgtggtctaaatggtgcagctggatctccaactggccgcggaaatggacgtgcatgaatactatttgccccaaacactggtgaagatgtttgtggtcgctgcacgtgatgctgcattgtttgtactggtatggagttattgggtggacgagtttgtaacatatggacccctttcccatctgacatgtttcccatttcattagcctaatgcaaattggtttgtgaaggtggataacccgtattactccgcatttggccagacaaggaaggccgaaattgaggtggtcgagtgctggcaatagcttgtctcatagggatggtgtgcgcccctggatatcccttctgttcatctcctgtcacagaaccactgggagcagtctgctgaccagaaacttgacctgataaagaatagttgcttgggtttgtctgagggctttgttgtgcctgagcaaacatgagtaaataacccacaaaacaaaacaaaaagtgctggtaagaatgactaataagattgcatcacaccaaaaatacaaagctatggtggcaagacaggttatgtttacatataacacaatgaagtggaaatattatttacctgcatttgatattgtgaagtagcttgcttaagcaatttatcaccaacaatattccttacagtttttaagaagtattccttgctgacttcatttttctgttaaaaatataggataagcatattaatagctttcatgcaagttctataaaaaaagacaataaaaatcccatgtgattacttgtgacttactgacttgcatcagtatatatcttataagagaaacttagtattacttgggtgcaatagtaataaaaatatccgaatatcatagccatgtgttttagaggggaagaaattaagtcactgaagctatgctatgtctggttaccaaaacatctagccaaaatcaaaatcaaaattaaagaataaaactgattacccaaacataataattgtattgtaagtaggaaagtacccggctgcgattgaaattatggatgtgtgcacgaactgactgagtagtagatactaacatgtatgagtagtaacaggtacatactcaggtatgagtagtagagaagatgtaccagaatcaggtcgaagttgcagttgctgtctggggaggatttggaatggggtggagcatctgtttggacatcttaaagccccggcatcctcgacgtcgatggtaggttggcgcatccatgggaggtgaatgaaagttttcgtcaaggatgcgggttgggcctgatgtgcggaggtggggactgcgggatgcaccttccatcgatgcctgttggatttatatggcttcacattggttaattcctagcctaggatttaggctgtgtttatatatatatatatatatatatatatatatatatatatatatatatatatatatttgttcaaattaagagttggtaatagttttaccaggaatcaaattttattacatgtatgtgttcagacttcagacgcatctaaatccattgtgacattgcacctagacagctagccaacaatttttttattgtcctggtttatatgttagtctagtggattgcccagttacctggtttgctatgtttggttgtccgttgtatagtggtagattctgattccatattttgttgtgcacagggcgacgcagacagctccttggacaggctgtggcagaagaaggctgatatcaaccagtagattttacatctagtttaccaagaattggacactgccttagctatgttttgaattcatgtcactatatgcaatgttgtgatttcagctggtaccttaaatctgaagattccatagtttgatgtgtggtgttcgtttaattccctcgtacaaccccatttagtatcattgtgatgattttggattcaattttgctcgagtcagggtacgattccaataactgttattgcaattttgtcgtcaccattatactcacgtcgtccatcttcattgagtattgattatttttcttaactgtcaaggccacagaataattaaaaacatcaagggagataatataaatcattgcctcaaaacccttctccttagagcatttccaagagggacttctataattggggcctaaaaaattaggaactgatttctagggattaggacccaacatctttttactccaacaactactcctaaaaccaaatagttaatatatgttaacatctagtttaagagaacaaacatagaagaacattctcaaactctcaccacaatgcaacaaaatttatggaacaggaacaaccatagtattctcatcaacccaagatactactccctccatccataattcccaatagataaggactcctgagaattttaggaaaaaataagtgtgccaagggactccaaatagggaggacatgctgaacggatcatctgcaaccaaagttatctccaaaataacttatgaccgcaatgatacaaccagactcaacaaacagaatagaccttacactttacagtataatgacttatcttgtttctagagaagataatagcttatagtctactcaagaaacagaatattagtccaagcatacttgcacaaagaccaagtaaacattagctataaaaaatagttaatgacaatagaccttacactacaactactcagggtaagtgtcactttacagtattgcaaaagcaaccatggtctcttaaaaggccctactgtttgaaatacatttctcaataaacttatcttatattgcaaaagcagaggaacatcatttcgaaaaggaaaaggtaaatgtttcaaataacacaaaataagtcaagcagagaaacatcatttcaaaaaggaaaatgtagatgtttcaaataatacagaataaggctcaccactttcccagggaagcatgttcataaaaatactaaaatagataggaaccatggaccagtgacccatgcaacttgtacaccaaggtaatcaagatgatttactggaaaatacatgagtgttcttgtcaatcttgtgctgttaatatgtctgacaatcatgtggtacaaataatggaataagtcacacacctaactttgggaatcgtctcgcgggagggctctggttgctacgtcgtcgcggggcttcgctggtcccgacgatccgtctcattgtcgatacctatcgattgcaggttgcaaagttaggtaattccagacagacacatccatagaaaaaataaatttgaaattgacaacaaagtttcatcttcctataattctggatttggacaataagcttagctccagcagcaccgagcaccaaaatcccatcccagtagccccatttaaccacattcaagacagagcaattaggatggcgatgcgggtttgagggctagccaacttgcatccctacctagaaacacctaaggaacccagacaacaaacacataggagtgaatatgagctgcaaaggcacgtcaactgctatcctgcaatttatatgtggcagacaaaattactaaattagtgggaaacctacctatttatgcagagaagtcctctatactcccatcgttcaaacaatggataccgccaaaactgtaatacacccatgcagccttaaaacacaaacaactatcaaatagctgaggattaggtacaatgtcatatgggatgttatctcccactctataagcataataaagataggtggcagataacactgcaggcacgaattgttcttccaccggttcatatgcccattgttcaaaacaatcaaaaagaaagggtcctcataaattttgaatactattgtactaaaaaatacatacacacatacatcctaactcttggtaagaagcaagtttagacttactactcatatcacctagggacggaccttgtaaggaacatgggtatacagatgcacaccctataatatccatgtatacttgtaatagatcagattcgaatacaaatagtatgtcacaactcacaactgaagggggatgaaggacgattattgaagaggtggaccggccggtggtcgatattgaagaaggcagttaccggttcagaagatagagagcagattgaaaatgtggtttgaaaatgtggtaaactgtgtcataggatgtgcatctactgggatagcatctattgtctttagacatgagcagcaactgcaaccatattaattatcatctgctagagagcaaagtggcaagatagaacatataaacttaacacaatcatactaacagaaacatatagagctctctaagatctgtgactaccattgaattttagaacagggagacaattgcatcaatttgttcagataaattatagattttattggtcaaaacaataacacaagtagccagcagtgtgctcaaaatacctgtgacggttgaaagcgcaaacaattccttcgatagtgcatcaacttgctctttggctaggacctgaaacaagggaaaaagtcacatgcataaaccttatagaaataaggatgagaagtactttcctagttttatgaaacattttggcacattttttggatcaagtcaactgagggtgacaatttcagtctcagtgctactccaaaaaagcaacaggcgatcttcttgcagtgaaagaagtggaacttaaacgacaaagaaactacagatcaaaccattacaaacgagaattattttgcagggatccacatattcttaaactctagggataaacgaccacaataaactaagatctaggagcaagacagctagtgacagggctgtcgtgtacctcaacgagaactggttcacaggcgaggtggtggcgtcggtggaggccagcggatgcgggtgctcttcttccaggacaacttcttgatggggatcgacatgggcggtgcagccatgagcgcgcactggaactgcatcagccaccaccggctgtggtggctgagagataggtgttgatgaccatgccggtgagaaatcgaggtcgctagggttttgtgaattggggcggagggtgtgggcagcgggcacagacctccctgtcatggcgtgcccggtggggtggtaagtggggttggggcggcagcgcaaacatcttagggtgcttcaggaaggcgaaatccgcggcgtgcatggaggtctacgaaatcggcggtgggtgggggtgagggggatgcggcagtaacaaacctgcgacggtgcggggggcgtgcgatgcggggatcacggaggcgaggcatggccattgactgatggcgacgacctcggtcgggacgctagctcccacagccgtagaatgctagctcccgcagcgacggcttcgaggtccacgagccaatcacctggcttggcgcggcccaagcagaggtccccggcgggggctacgaggcggggcacgcgcggcagggcggaggcacagtgggtgccgtagatggaaggatgtgccaaggttggaaggagcaacaggcatcatgaaaggaaggttgtcgaaggaaggtgcgtgagcggcgatgatggcgaagccacgggaatcagggatctagcgcggagggcggaaggagcgcggagggaggcggagggagcgcgacggcaaaaccggctggactgtgcacgcctacgatacaaacataaggagtagtagagataactaccttagcctgctggcacatgtgcatggtgggcacaaagtgtcatatttgattacatggattaatcagatagcaacactaaactcctctcttttgcaagctatatacaaggacatgcatggaggagccgaggaggtgaaggaccagatgccatatatactcgtgcactagctttctaacacgtatgttaaaaattacggactacatcttaattatgtgcatgtaggacatataaacctagctagctagagatgtgggaacatgcatgagatcatatatgtccctaaggatgaactttaattagtatatatgttgaaaatacataatgaattttactatggctttgttcgattattcacattacacatggattgaatgagattggaaaaaattaagaagagatttaacttgctttcgatttaaatccacctaatctcactcaattcatatggattgagaactaaccgaacaaggtcaccggaacgttccagcctgaccagagttgttggacgacagctcgctgccatttatcagttatagtacgacatatggaatcctagccttgatcctccatttgtgtttgtcgttagcgttaacacggtgcttgtccttagtatttatgtgtatgttaccggttaattttgtatcttttggctagtataccccgaactcaaaagtattcccggagacccaccaccttaatgctgttaacagctacattaattgccgacaaagttgccatgcatcactcatcagttatatatttatgcatgataataacatatagatatatgactcttttttataagaatccacgatggacatgctttaatagttaactagagaaaagaacactgctaagtaatttctcaaatcaaagtaaagctagagatcaaggtatttagtgacatcatttatttgtgaccgaaggatccgacgaatgtgaggcacaaaaaattctcaacctagaacacacatggcttgactctcaaaactcaatacagaccccaagggacaccaaaaacacctcaacataaacaattcaatctagtgtcaaatttatgtacactttagaacgagcgacagtgtcgcgcgacaaaatcttattagaatgactttaaattaggatatcaaagagaaatgtcaaccttgtgtacaaatggaccattcctcttttttattgtgtctttggtttacccaatgttggggttggtcctccacatgttgataagaaggaagaagctgatcatagaaattaaggcgctatcaaagaggttctatgggttttgtaagcccaagacacttattattcacattaaaaaagattgcagcaaaatagcttgatgatgatcttgcgtttaggcgtcccttcatggttgtgttatctactatttccaaacttttttatataagggtttctgacatgatgtggactgaggatgttccactcatatgtaatttaaacaggtgcaaagctacggttgataacctaaggcagggtggtaggttgtataagatggataagaagttaatggtaattaaattaggatatgaccctcacatttgtgtgtgtgcctctagtaaaattaattaaaggaataataacgacgactaagaccatgtttgatcctcgcggctaattatttgccagtggctaacaattacccggtaaatagtttgctagcaacaattagccagggtatgtttggagtctttgctaatatatatgtcttttctctttatacgttctattagcacctatatattaacaaggtcaattgactaatgggcaaacagtttgctagcccccgactaacaattagtcaatttattagccagtttgtttgagggccaaagtggtaaaattaaccggtaaattgtttatcacacagatcggtcgaataggaaattaaaaagggacctaaaaagtaagcaaactggcgacttgtagtacttgagtaacatggatgcacggtgctgcccatgcccttgccctgtgaaagaattgaatggagagaaaaaaacgaacggcattacggttatattatttatttcttcttattatgagaaactatattatgataaacaactttatctatatcgattgagttttcatgaacgaagcttaagaacaaaatgactttattggtaacatggagccgtaccaaacacacgcatgcatgcatgatctataagtagattatgtttggttaagctatgtcttttgaaaaagctgtggtgggtattgaaaacgcttctatagaaagagaccgtgagaaagtcaaaaacccttcgcctaagcagttgtagtttttggcaaacttttaagctcatatttctcttgccaacactagtacaaaaaggctcaaagcctgcggggacaatatatttttacaggcggattcggttatccaccgactgtgttatttctagtggcggttccttaaaaaaaacccccccaaaaaaaatattttttttggggggtttttaaaaaaacacccagaaaaaatttttttttttttgtggttttttttttaaggaaccgccactagaaatcatttttatccttaatttttcgagtttttcaaacggcctcgtatgacaaaaccaccaaaataaaagttgttgatctctaaaagttatgaaactttgtagttgacaacttttttatttgaactcatttcggttctcaaaaattgaatctaagtatgtcaaatttaaaattcaaattttgcaaactacctcagatgaaaaaagtgtcaaaataaaagttgtagaacttcaaaagttatttatctttgtagttgacaacttttttatttgaattcgtttagggtctcaaataagcaatttacactcaaatggttgtaatatgtggagaaaacaactacaaactagacacaagataaactagggtacgcgcgagggtgaggtcgacggttcgaatactaacaaccgcgtagcgcgcgaattttgcgcgaaaaatgccgcgacttgcgacttcgacggagacgggcgggtggggtgggctgaggcccccctaataaaaataaattttttaactatttttaaaatatgttttatgtttcctggaaacgatttgcactggcggttttattacgtcgaccgccagtgaaaatcgattttcactggcggttttattacgccgaccgccagtgaaaatcgattttcactggcggtcctcagttacccgcctgtaaaaatgatgatttctactggcccctagcactggcggttacgaaaaacgccactataaattggtttacaaccgccactatagaacttctctgtactagtgcaatttgtgttccttgtgtgtttatgttacttttttacaggtgatgatggcgagggcaccctagatgtataacttatcaaggctagatcgatcatacatatccgaggttcataggtttattaatgtcgctacgaactatgcttagagaacaaagacaaagtatatatattgtccatgtatggactgcaaaaaggttgttgtatttgatgatagagaacaaataatatctcatctggtatgtcgaggatttgtgaaggattacatgatttggacaaaacatagagagggtagctcttcgccttgtacagctggaaacatcgacgataggtttcagttcgttcacaagacacaaccgtaagtggaaatgcaatacaacattatacgcgagggtacacccagcaggaaacatctttacctaatatagggggtgtttggttgcccctgctaaagtttagcacgggtcacatcaagcgtttgactttcaaataggagtatgcaatatagacccaaccaactggactagattcgtctcgtcttttaatcttcggctgacaaattagttttataatccgactatatttaatacccggaacggaggttcaaacattcgatgtgataggggctaaagtttagtttggggtaaccaaacaccccctaaaaggaatgtacctagctatcacgtacttttgtagggagagctagttcccaagacaaagggaggaggaatacacgctcgatatggcgacaacacctcgcagtacgcacgcatgtgcctcgcattcagtcagtattcagttttctacttgttggagccttggactgttgctattatctagtggatccttaattagttcgtttttttaaaggaaagaaagctgctttccctctatctctgcttactaattcatatagggatcccttcatattgggcgcaggcattcaactctgtactttctttaagaattagtatatgcaatcatcggactagaaaaaaaaacaaataatatatatatggcaaacaaatgcaagctagtcccgtctaggtgtatgcggaattagcaaattaagggggtgtttggttgctcctgctaaagtttagcccgggtcacatcaagcgtttgacttttaaatagaagtatgaaatatagacccaaccaactggactagattcgtctcgtcttttaatcttcggctgacaaattagttttataatccgactccttatcataagtagaatatttcagactagcaccgcttaatttttcactaaaataagcaactggttttccttcttgtaacaaaacagcacctagcccaataccgctagcatcgcattcaagctcaaacaccttattaaaatcaggcaattgcaataggggagcttgggttaacttatctttcaaagtgctgaacgcttcctcctaggaatcactccaagcaaatgacacatctttctttgtaagctcatgtagaggcgctgcaatggagctaaaatcacgaacaaatctgcggtagaaaccggcaagtccaagaaagctccgaatttgtgtgaccgtcgtcggtgtaggccactcccgaatggcagcaatcttgctgctatccacctcaatgccctgtggagtaacaacataaccaagaaacgagacacgtcgtgtacaaaagatgcatttttccatgttagcaaataactgggcagcacgcaatgcatcaaaaacaacacttaaatgttccaaatgctctttcttagatttgctgtaaataagaatatcatcaaaataaacaaccacaaacaatcctatgaagggccttagaacttcattcatcactcgcataaaagtgctgggagcattagtcaatccaaacggcataaccaaccattcatataaaccaaatttcgttttaaaagccgttttccattcatcacccagtttcattctaatctggtggtaaccactacgcaaatcaatcttagtgaaaataatggcaccactaagctcatctagcatatcatcaaggcgtggtataggatatcgataacgaatagtgatgttattaatagcacgacagtctacacacatacgccatgacccatctttcttgggaacaagtaacacaggaacagagcaagggctaagagactcacgaatgtatcccttgtcaagcaacgcctgtacctggcgctgaatctccttcgtctcatccggatttgtacggtacggtgcgcggttcggaagctgtgcgccgggaatgaggtcgatctggtgctcaatgccacgaagtggtgggagacccggtggtaagtctttgggaaagacatcagtgtactcctgcaaaaggttagcaaccatagggggaatagccaaagatggtgcatcatcaagtgaaatgaggacactagagcatataagtgcatagcatggcaaatgagcaccgtgtagatcatcaaaatcagcacgtgtagcatagcaagtaaaacaggagccttcaacttgatttcagaaggaacagagggcgatggatcaagttgtttagcagttatagcagctcgggcaagatcatctttaacaatttgttcaggtgtcattggatgtataattattttctgacccttaaaaatgaaagaataatgattcgaacgaccatgatgcaagctatcagtatcatattgccaaggtcgaccaagtaacaaagagcatgcttccatgggaataacatcacaatcaacaaaatcagaataagcacccatggagaaaggaacgcgcacggaacgtgtgatttttattttaccaccatcattaagccattgaatgtgatatgggtttggatgcttacgagtgggtaacgataacttttcgaccagcatggtactcgccaaattgttgcaactgccgctgtcgataatgatgcgaattgaccgctcctgcacaacaccctttgtatggaacagagtgtgtcgctgattcttctcgggcaaagcgacctgtgtactgagaacacgctgcacaacaagactttcatacctatcagcgtcgcccgggttgacatgtacctccaccttagctgcatggtcagtggcaagtagtgcatgttcaatttcttcagaatcactagcggaagagtactcaccatcgtcacgaatgagcaaagtgcgcttgtttgggcagtcccgaatcacatggccaaatcctctacagcgatgacactgaatatcccgtgtacgacctgtgggtggggcagtgctggctggtttggtcgtcttctcgcgtggagtagtggtggacgtggatggcgcagggggaactggtgctgaggtggatgtcgagcttcgtcctgcaaaagggttagaatatggcttcgagcggcgtccctgcacttcacgttcagctttgcaagcatattcaaataaagtagtcatatcataatattccttataatcaagtatatcttggatttcgcggtttaaaccaccacgaaaacgtgccatagcagcgtcgttgtcctctaatatgccacaacgaatcatacctttttgtaactcctggaaatagtcctcaacagattgagaaccttgctgaaaacgctgcattttattaagcaaatcacgagcataatacgaaggcacaaatcgatgtcgcatcgcagctttcaactgatcccaagtggttggaatggtagtgggatgttttattttaaactcacgccaccaaattaatgcaaaatcagtaaattcactaatagcagctttaacctgagaatgtgcagcaatatcatggcatgaaaatttttgttcaacctctaactcccaatcaagatatgcagcaggatcatatttgccattaaaaggtggaattttaaatttaatcttagaaaataagtcattagggggatgatcttcccactcagtgtcaccgccgtagtcctgctccatctttgtggtcaacgcatcaaggcgtgccaggatggtgtcgagtgtggtgcgagtcgccgtttgagcaaggtcaagctggttgaaacgctcggtcgtcgaagtgaccgttgaatcaagccgttcatgcatcgtcctaatgtcatcagcaagtccatcaacttgtccccttacttccagcaactgggcatccaccgtgtcgtgtgctcctgccatagttagcgcaaacaccaaaacaccaaaagaagaagaaaaaaaacaacgacaaaaacaggggtgtactgctcacaaggcgctcacactagtgctgttgtcaaattcttatccgttcttaccaagccacagtggtgaactgcaaccaacaggtggaaccggtgaaagattggatgagcgattgcctggagaaacagaagcctgctcgtcgtagaaatatgtggagttctgggtaggctgcactcaagtcaatgattagcacaatcaaacaataatgcaaagttgaattatagtgcagaacacgaaactatattgctggccacaagtgcaaaggacggatggaactagcagaatggcagtaccgtaaatattgtactagcgaggccactagtaggaatcacaagtgattttgtttttcttttttgtatgattttttgatatttttctcagcacaagaagcaacaaaataggagctagacgaagtttcacctaaaacagagatcagatgtggtctacagaaaatcaggaagttctctgaaaagcgtgcgagaactttgacggatttttttctttattttcctgaattttttttgacaattttgacgaacccaaacagaccaaaggtgagtttggccggcctcagaatggtgtcaactagctcctgtaaaaatttcagattttttggacacccgagcgaaaagttatgcccggtttaaggaaggtacctcaagttatgttttcaaacgaccgggatgaaacaactatatcctttctccttcgttgttttttgttctgttttttttgacgtaaccgaaggagaaaaacaaggaaacgatgttgactcagtttgtttttttttctgtttttttttcgtaaccgaaggagaaaaacaaggaaacggccgttgactcggtttgttttttctgttttttttgacgtaaccgaaggagaaaaacaaggaaacaatgttgactcggtttgtggcgtgatcaaaggggagatggtggcggcgctagggtttgaatggtggaagaacacaatgcaaccagcaacaaatgacgcgaaagcacacaaattcaacaatgcagattattgaaagaaagtgcgaggctcaaaagggtgctgggataaggtctaacctgaatttttatgtggttttgtggactgtaggaaaaaaaacactcgataaactcaccgatcaacctggaaatctgataccaattgatgtagctgaggtgcccgatctttcggcgagtagagataattccgatttggcggaagatgacccttgcgatccgactacgacgagcaagcccgaggcgccaatgcaatcgctgaaccaacttcctgtggttaccgaccttgctgatgcgagatcggcctgatcacgaagatcatttcctgtgcgcaatcgaagaacgaacaagaaaaagatgcgagcaatctaatctattactcgagggtggagttctgaatacacgaagacagcgcagatttgcgcgtgttcgagagtagctaaagctaacgtaaaacaaaactctagaaataaaggaggcgcagctcctggataaatagagagggggcgcagcccctaggggcggccaaccctaggtcgtgcattatgggccgcagttgggctggtcgtctattcttccgggccttcgttctttaacagcatgatgtagttcaattctcttgcacgggcccgagtcactggcccaggtggaaggggtggcgcctggactggggaagatggtgcctgggctggagaaggtgctgctggtgtagatgtgcatttaatacccggaacggaggttcaaacattcgatgggacaggggctaaattttagcggggtgtaaccaaacaccccctaaagcgaagaggacagagatcgagaatgatgccaaactcatgcatatatctaatcatacatatacctagggtaacaagcagacgaaattatgaggtgtttggtttgatgaatcactctatccaaaatgaagtggtgcatcatgagtccatttctcaaatttggtgagatgactccattacacatattagtactaaacaactaactatgatgaataaggtggtgatggattaactcactctattccacaaaccaaacaaaaaagtgagaagtgagaagatatggactacctcatttctcaaaccaacaccccattaaggaatgatcgtgccctccatcatccctgcggctgctgctttcgtggtagctgacgacgaccgctgcagtactagggaatgagctgatatgacttgactgcaggctacaagtaggactagtaccgttagagccaccgtgctcatgttgttgtattgtatggcttttggatggccattgctagctcgaaggggaaaaattaattaagctagggatgaaactagctgaagaattaatcggtaaagaactgataataaggtgggttaatttactgcttgcttcaaagttacttcgcctctctagctagctagcttttgctggtcgacggcgacaacgaaccctcctagctaggcttagctcctggctatttataggagcatcatgtacattattcaagttatattacagtctgtcttgcacatggacgtacggaggataaaaaattgatccaccaatctgtatagtcctgtaataataatgtaatgtaaaaaatgcgcgcgagacgcaaatgagaataccggagaatagggttttggtctaacaacttttatttcagttatttaaaaccggtattgacaccagcttccgtgcctgttttaaatgtggagatcgatacaaaagaaattagtactggcttttgttcccaaccagtgctaatatgaggtactggttcaatccacgagccgattaaaaacctttaataccggttcataaacctgagaggcttttagtacacgggttattatatacaacctgtactaaaagtgattttactttcctaccggcgcaattagaatttgtgccaatattagtttagcaccggttcttttagaactggtactcaaacttagtctttagtgctagttttaaacaaggatcggtattaaagactgagctttagtacaaggtttgcataagaattgatactaatatgcaccatatatatctcctaccatccatgcagacccgaaccagatatcacgccgctagagaacctcctgcatcacctttatccatagacacgatgccaccactctcctgcggcgttgttgtgctcccgcatccgttcctcacctagagccttccctgcacccttatcgatcttccgtagcgtagtcgccttcctcgccttcgccatggacaccaagcagctgccttcccgcaatgactccaagcaaccggcttcgcctaaggattgctgctggtaaggttgctaatgacttcagattactgtgatatatcatccagggggttgtctttggatttctatgtaatatttgtccataacacacacattatattatagaccatggaaacactagtttcaagataaaatcaatgtaataaactagggtttagggtttatggcttaatttaacaacaaatattttgaaaatgtgacatacatattattaagtgaaatgcttctttcattttagatcaatctatcgtacacattgtttagtgaaatatctcattatttttatctttttaatcccatacattttcaatcgtctagtaagtgaaatcgaaatgccaaatagaacatgtctctttgggttcttgctctgccacaagttgtgtgtctcaacaccgatccgcacccaggcaccaccgaactcggtcgtctgacattggacacgcacacctgcccttgagccaatgattgtgtcaatcctctgcagtgaactgatggacctcgaaaggagactatgtcttggtctctgtagttagaagtttcattgtgatggatatgagtcatggagaactactgatattactttactagaatggttaaaaacttataaatgagcaaacaccatgactacagacgaattaagagctcaattgatcaaatgaaaaagagagacaaagatcataaggtaatagtggcatccatattgtaatatgaaacttattttcatctttggacctttttcaattgtcatttttagtgtaggaaggaaaaacaacttaaagagaatgtgagtacatggctagatgtgttccattatgtcgagcctaacgttatcctaggttctccaattgaagtcacctcaactgctccgccaacggacataagatgtcccacacacctagtagttccaacacgaaatcaaacattggtcaacaattttctaggtttctacaagaagacaacaaaatagcatatgatattttcaatggtccaatgaatatggagaagtgtactaaaaaacttatggagcgtggtttcacaggcaaagtacttcaccttgttatcaactactgaaacaagattgggaagctcgttagatattcatgacattagagcaatctaaagctaaacctttgtttcaacttttgttgatgattatagctagatgatgttgtgtgggtgttgaatgatgtgaacaatgtagtgaatgcggactgtgagttctgaactatggagtgattgtgagttctacgttgtgaactatgatgtgaagaatgctataaactatgttggttttatattgtatgtatgctatgaacattgttttatgttgtatgttatgaacattgtaccagttatgaacattgttttatggggcgggcgagcgacgatgaccccaacgagcaagcggaggcggttgcctcgctaagcacgggtagctacggtggcgatgacggtcgcgcgtggcatgggctgcgagggtcggtggtatgcacgacggttcgggcatcctttggtgaccagctcctccaatccggaggcctcggcggcgtccttcgacgacgacctcctccaattctttgtttatgcatgcaaccgttggttgagcccatacttagttttttcattaattatgatgtacgttgtaggtgtttatgcaaatttaaataatgatttatgctttgcacgatatcagccatccaatttttgtgtgtatgcagtgggaacgaaaatgccattcaaaatttgtgtgcatgcaatggaaactccgatgacatgtcataatttcggatctgcataaaaataggaatcacatgcatgtgcctaatgattgccgtattttccagatctgccataaaaataggactgcatgcgtgcgtatggtaggggacacgcctgaatacatgttcctagtggagggatgacatacaatcacatacacatttttatgtcactttgtatacatatttatgccaacatcaagaggttttcaacaactttcatgttgatcagtatttatgctcataactgcgagtttttacactcaaaactgaaggtttttacactcgaacatggagatgcgtttaccagtgaatcgcatgtcatatttttacgcagcgtaccgtattgcataaatacctacaatgtgtagcataattaatatcagtatatatcataaacgggttctaatgagactaactacatggttgttggagtgatcctacatttatggaggaaataaatcattttaaataagtttttttgttttcatgcatgccaatccatttatgtaacactataaaaaccatcaactaaaaataatgcatttagttattaatggtaattatggtaataaatttttcattcaactgtttgttacttatttgcatttgaaataatttttgattgctcatgattgattttggatatttaatagcatttcttcttaaataaaaattcaaataaataatataataattattaggccaaaaataaatattttatttataaataattttggtttaattattatgaattttagggttatttaaaaatatattttgaaataaaaaaccctaacctaaccctaatggcccactaggggcccattaacaagccgtcgcacctctccttggctccccagccgccgccgccaccctccttcttctcctccccttctctctcttgcgcgcgggccccacccgaccccttctcttcttctccctcccctcccccgactgcacagccgacatgccgtcgagccgcgcccagccccgacgcccgaccgcgccaggacccgaccccggtcgcgccctgcacccaggtcgccgagccgccccggtgccccgaccacggccgaagcaccgcgatcgagccgtgccccgcatccgttcttcctctcgaattaaggagcatcaaatcgaccgtttctcctccccactctcccctccattgatgtcgacgccatcaatggccttgaagcaccgaccgaccgcctctctctctccctggcgtctcttcctctctcccttctcctctataaaaccgacaccgagcccttgctcctccctacctgagcttgcccccttctccctctcactctcctcgccgttcgagccaccgccgccgtcgccagagttcgcccacaccatcgccggagcttcgtagaccgcccgagccgtccgacgccgagcccatgctcttctccactcgaccgaacccccaacgatctctttccggttacacgagcaagctcaaggttgaagacgacccaaaatataattttgtatattttagaaatcactttttgaattagtttatgaattcatgtaattattatgttgtaatatgagcatgttgtgattcggaattcatacgtatgtgcgctatggatttttggtagatatatgcgataaattagtgcaccgtgattattcatgttatttgtttacgatgacttttagaaagttggattagagagaagtatgacaaaaatggatagacacatgttggtgataaatacactagataggtaattttatagttaattttgttcacaatgaattttggaaattatttggaaggttataatcataagttcattttaatagataatagaagcttttcttaacatggaactagtacatggtatagaattcatggcaatataaatattataagttaatagatgatttatctccgattattattaataataccttcttttagaaagaaagaaaaatactaaaagaatacccctagtcataatgaaaatagatttttactagccaaaataaaggtgtccataagaatagcacttaacttctaacttatttatgtcaaaataaccatgtttatgttataaaaagcccaattgatgatttttattgattcttagaatattaatgttagtagagtcatgaataaaccatttttagctatacacataagttctgcttagtaataaaaggaataaaatttattagtttattattagtaataaagaaaataattagcatttattttcttaaagaatgttatttagaactagcattatagccacctactcataatttcatcaataatgactcgcagtaatagtcataatgaattataagtatttacgctttaaaacgtaattatgagtgtgataagtgtgatgtatgaatgtgaatgtaatggtgaatgattacccctgtgttggtgtatgtttatttatttggcgtatgtattcttttatatgtgcgatacgcaaatcgatgctagaagtggactgtgaggtagacgagccaaacacgttcgaggacgacccacaggaaacttttgagcaaggcaagtggattttccctctgcatattctatttgtacccaactaatgcatataataatgtttatttttttgatatattgcataatttgatgggatttgcctaactaaggatttcctagatttaccaactgaattccttgattaccctcggaaaatactatgctttgcaaaatttgttctacctctcaacttgataattttgatgtcactcattatttgatattaatgttccggaaatgaaattggcattatggtgttaacccgatggttaaacaagattatttcatattaattgaaacatggagtgacccaggataacagtgcaaccacgagtgctatcatagctctggctttgataattagctttatatgcttagtacctagcaaccttacctgaattatgggcaagagggggagcgacagtggcagcaactcacgttaacaaggggacgtattcttggctaaggtacctcacccagagggcctccataccgacttggaaaccttagcgggttgctttgtattaagtgtattttgtgaaagcctcataatggatccctagccattcacctcggcagtgtttacgggtccgatcaacccagactagatgggatatatggcttgtgggtaaagttgtaccacctctacagagtgtaaaactgatatgtcagccgtggtcacggtcaagagcaacctggaccctcacatgataattgaacctaaagatggacaataaatcgagatctgttgatctgccaatggtttgcttaagtggtttcacttaagtgcttttgatatactcttatacctttgtttaaatgggatacttgggatacacacttattagtaagacaggcgttgctaataaaatattgaccaactaaaatgcttactgctcaaccttagcctcaccttattaaacttgcattaattttttccccacttgctgagccccggccataagtgagctcacccttgctaatattttgattagagggtgatgaagaagacattgatggaaatttcgatgaatactgagtctaacgatgcgccggtcatcttcctgtgggagattacccatattttattccgccttactttgatgttgatacatgttaaagatacaatgattaagatgatataatacagtactctactctctttacgcctttattgtattgtcttttgatatattacacttgtgacgtcaacatatgtgtagaaatggatcttggcacacatacgctatgcattcggttttgcccccagaaccgggtgtgacaatttcctttcatcacattcctgtcatcctaaatttgtgtgcatagagcaggaaaaaatttttacatagtgtaccgaattgcataaatacgtacaccatgtaacataattagtatcagtattgtcggcgttccaagaccggggggtccctgagccgacgagtgaacgtcgccgcgtgccctagcccagatgggtcgagcgcgagggcgagcgcgaaggggggagagcgaggcggccagagatcggcgtgagagaggtgggaatcccgcggccttcgtgttcgtcccgcgcccaggtcgggtgcgcttgcagtagggggttacaagcatccacgcgggagagggagcgagcggcttcaagcgagcgcgtgtctcgtcctcgtccccgcgtggccaaccctctctaagagggccctggtccttccttttataggcgtaaggagaggacccaggtgtacaacggggggtatagcagagtgctacgtgtctagcggaggagagctagcgccctaagtacatgctgtcgtggcagccggagagattttggcaccctgctgatgtgatgtcgtggccgtcggaggagtgctggagcctgacggagggacagctggcggagcggttgagtccttgctgacgtcctcttgcttccgtaagggggctgagagccgccgtcgtcacagagtatgcggggcgccatcattgcctatctggcggagcgagccagatgggacaccggtcttgttccctgtggcccgagtcagctcggggcagggtgatgatggcgcctcctgttgacgtggctggtctgcgccctaggttgggcgatgtggaagctcctccgaagccgaggtcgagtctgtcttccgtggccgaggtcgagtccgagcccctgggtcgggcgaggcggagaccgtcggctgaggtcggggcgtagtccgagccctggggtcgggtggagcggagttcgtcgtcttctaggactgagccaaagtccaagccctgggtcgggcggcgcggagttcgtcgtcttctggggctgagcctgagtccgagccctgggtcgggcggagcggagttcgctgtcttccgggactttagcccgagtccgagccctgggtcgggcggagcggagttcgtcgtcttccgggactttagcccgagtccgagccctgggtcgggcggagcggagttcgtcgtcttctggggctgagcccaagtccgagccctgggtcgggcggcgtggagttcgtcgtcttctggggctgagcccgagtccgagccctgggtcgggcggagcggagttcaccgtcttccgggactttagcccgagtccgagccctgggtcgggcggagcggagttcaccgtcttccgggactttagcccgagtccgagccctgggtcgggcggagttcgccgtcttctgggacttagcccgagtccgagccctgggtcgggcggagcggagttcgccgtcttccgggacttagcccgagtccgagccctgggtcgggcggagcggagtttcctatggtgcctttgaccgggcctgactgcctgtcagcctcactctgtcgagtggcaccgcagtcggagcggcgcaggcggcgctgtcttcctgtcaggccggtcagtggagcggcgaagtgacggcagtcacttcggctctgtcggctgggaggcgtgcgtcaggataaaggtgtcaggccacctttgcattaaatgctcctgcggcttggtcggtcggcgcggcgatttggtcagggttgcttcttggcaaagacagggcctcgggcgagctgggaacacgttcgccgctggaggggggcctcgggtgagacggagatcctccgaggtcggctgcccttgtccgaggccaggctcgggcgaggcgtgatcgagtccctcgtatggaccgattcctgacttaatcgcacccatcaggcctttgcagttttatgctgatgggggttactagctgagaattaggagccttgagggtacccctaattatggtccccgacagtagcccccgagcctcaaagggagtgttagcactcgcttggaggcttttgtcgcacttttttgcaaggggaccagcctttctcggttgcgttttgtaccggtgggtgcgcgcgagcgcacccgccgggtgtagcccccgaggcctcggaggagtggtttcactcctccgaggtcttaatgcctcgcgtaatgcttcggctggtctggttgttccctcatgcgagctggctatagcccgggtgtacggtcggttcccaagttctcgggctggtatgttgatgctgtcaacggttcgaccggagccgggtttgcgagagcagcccccgagcctctgcacagggcgagagggcgatcagggacacactcggcttttttacatacgcccctgcgtcgcctttccgcaaggaggaggggggaaagcgccatgttgccctcgatgggcgccgaacatggtgtctctggtgagctgcaagcgggtaatccgagtggacgtccgtgccccgttcgttaggggtcggctaggggcccagaggcacgcccaaaagtacctgcgggtgatctgccggacccggtcccctggcgacggggtccgagggctcgatgcctccctctgatgggattccgttacaagaccgttcccgctggtctcggaaatgtcctagggtacctcgggagcgcagcccgagccttggttatgtatcgaacgtacccatggtcatccctcgctcggcgtctgaggcggctgtgaacccttcgggggccagccttcgaacccctgatcagtagtgggcgcggagcccgagtagcctgaggcggccgttgaacccttccgaggggccggccttcgaacctctgaccagtagtgggtgtagagcccacgcgatctgaggcggctgtcgaacccttccgaggggccagccttcgaacctctgatcagtagggaggctcggagcctggttccttcacggggaaggatccttttcggggtatccccctttctcggtccctgttgcaagagagagaaagaggaaaaaaggaaaaggatatgaaatcgaacgacgcggcgtaccttttttgacgcggtcattatggcgaaggcgaagcgtcgcccgcttctcctgccagaggcgccgcctgtcccgccgcggagttaatgcgacggggcgagtggttggcggggcggccgttgcacgtgcgcgagccgttcgaggaatggatcacgggcgcattgtcttcacgccgtgagagtgggttctctcgctgcccccggacgggatgtgagcttggctgacgacgtggccgctgctcctgcccgcctgccatcgccattactgccggcccatttttggccgcattgaccgccgcgccaggctggcgctgctgggtcgtgcgctgggtcgcctcgagtcgcggtattggttccgcagtcgaggaggcgcggtagtggcgcaagtggcggtgctgttgcatgcacgaagcattcggcgcgccggttgcatgacgcgtgggcctgggcctccatgctgggcgtgttgggagtcggagaagtgcgcccacttggcgcggttgcatgccgcctgcatggctgcccgcccctttcgcccgtgggtctgggcaaaagcggagagtcgcttgtaaccactgggtggttgtacgcaccgcgcacggcggtttggcttcttctgctctgagtcggcttgcatgacgtgtgggacccagcccccgcgccatagggggaggaccttggagcgtgttggagaagactcagcccgcgacggctggggacgcaagcagggagagtcgcctttaaaaggagggtgacccccttagaaggcgaccacgtcttcgcgctcccttatgcatcgtgtctttccaccttccaagcccccggatgggggatatccaccgtctttccgcctcatcgttggaggaacgcaactccgtgggagttggtacctttctgccatcgttcggcttcaaggattttcatcatgcagcccggctgcaccccccgccggcggtcacccaagacggtgacctccagtttgatggtggaggaaagcgagccgggctgcggcctctgcccctccctcagcctcaaggattttcatcaccagggctggggaggggagtgtgccgagttggggtcagcccccacgtgggcgatggcccgctccttccctcagtgatcggggggaaggacggttgtcgtccgtggcgccggtagctgcagcgtgcctggctctcggacccgagtggcttcggagccgctctcggcgccggcttccgccacggtagctggaagaggttcttccgccgacgagatagccagggccgcccacgagccgacctccaactctacggccttctgcccgtccttgcctcacgagtttgggcacgggcgggggcctcctggcagcggcatccgccctgaggtcatcgctgccgctgttcggccccccggagcagaagtcgtcgtcgtcgccgctgccggagcgggcgacgtcgcgccgttcgtcggtcttccgttgctccgcaggcccccccccgtcgagtggggtttttcgtacctgcggaggtggaatcggagttccgtttgtaatggcactttgaatgccagtgtttttgttcattgtggctgtcggggcctgaacatgtatgtatttttcggcacggagccgtgttttttcctcatttttgagcactaagactcacctgttggttgtctaaaccgcttcaccaagcgtgagtcgccccgtgtaaaggtgacgagtgaggtatccgtatcccggaggcgtaggagtccctcggctcggtcggccttgttgcccgaggcttctctagcttggttaaaggaacccctcggccgctctccgatgagccgaggccaggggtagcggtgtcaacatgaacagaggcagagttggctcgaaaagaaaacctggttggccggagcctggccgggtcgtccgttagcgggaccgacgccgaaattgaccagccgaggcctcggtcgggctgacgtccttggaggacagctggccgaggccccggggtgaccggccgagccgcctgctcgggccggattcccgagaagaccctggcagcgatggcccgggcgtggcgatgacgtcatccttcagagtggagatcctcggaccgcgtcgccgtccgaggctaagtcggacctcgccgaaggcgttgtcgatgccgagggtgctgctgctcccttccagcgttaagacccgagcctgcaggatcggattgtcttgtagcgtgtgtttcctgcggccgccgaggccaaaacacaccctcgtcgtgttgtaaagctgcgtctcttttcctcttgcttcgagtatctggactttttgttggtaacagaaatgtttgtgcgagcgagagttgcttctcgcggaaggtgatgagtgaggtatccgtatcccagaggcgtaggagtccctcggctcggtcagccttgccgcttacgcgcactcttacccgtccttggggttctgttaccgacgcagtcgggaaggctcgaagaatcgctccggcagaagagcttccaaacgagaagacttgttcggtccgcggaatcacttatccgaacgcgagttacttatcgcagaaggtgatgagtgaggtatccgtatcccggaggcgtaggagtccctcggctcggtcagccttggctgcttacgtgtactccgtcgttttcagggtccgctttcgaagtagccaaaaagcacgaaagacattctggcagaaaagatattttttcgaggaaaatttcgacgcagagggggttccccccccttttagcccccgagggagggtcgggctttgccggggcgaggccgacccttccttgacgactaaactttgcgtgggtgcgaggtatatgaacaacttgaaaacatcttaagggtagaagcgacgtagatgttggatgttccaagcgttgctgtagacctcgccttgactgttggccagcttgtacgttccaggcttcagaattttggcgatgacgaacggcccctcccaggggggcgtgagcttgtgccgccctcgggcgtcttgtcgcagccgaagcaccaggtcgcccacctggaggtctcgagaccggacccctcgggcgtggtagcgtcgcagggactgctggtaccgcgccgagtgtagtaaggccttgtcccgagcctcctccagctggtccagcgagtcttctcggctagcttggttgctttggtcggtgtaggccctcgtcctcggggaaccgtattctaagtctgtgggcaagatggcttcggccccatagactagaaagaacggcgtgaagcccgtggctcggctcggcgtcgtcctcagactccagaccaccgaggggagttccttcatccaccgcttgccgaacttgttgaggtcgttgtagatccaaggcttaagcccttgtagaatcatgccgttggcacgctctacctgcccattcgtcatgggatgagccacggcggcccagtccacccggatgtggtgatcctcgcagaagtccaggaactttctgtcggtgaactaggtgccgttgtcggtgatgatggagttcgggaccccgaagcgatggatgatgttggtgaagaacgcactagtagagatcttatcatcgatgacgttcgtattgcatcactgcatgtgtatatatcgtcacagataaaggtttgtgacgaatttgtgacgagttcgatttggtcataggggtcgtgtcacatttgttgtgttgtgatggactacccagtttcgtcatcgatgtgtatacattctgtgacgaaagccgcgttgtcatggaagtgaattcattctatgacgatcagttgtggtcatagaggaaggcacttttccgtcataattcgtcgtctgcgacggttggtttctgtgatggtacggtatcgtcacagatagagccgttgtttggtcattaacagccatttggaaggtgctgatgcgtatgacgtcagtgctgacgtggctagtgacgtggcagctgacgtcaacgctgacgtggctagtacagtggcagctgacgtggcatatgttttattatatgccaccagtttggtcacagatgtgcagagaataatttaattggaaattgcaaaatatactagaacagaggaatgagcacacaattccatattccatagatgaatacaactagtattccagtgcgcatacaaactaagtggacaacactaaactcagttcacagcatcaccacttgacttcacatttcagttgagtttgcacaaacataacagcatataatcaaaagttgacacccacgagcaactagagtttttgggtaccctcatgtcaaagaacaggccaaaaacagcagctctgactagcagccctcatgtcgaagaagagttaccatgcaaggacaagagcttcttgatgagcacattggtctcctccatctccttgttgttcttctctgttatcttcttgtactcctccaactccctttgtgtcctcgcctgctgttcctcagcttcttcacatttcttcctgagctggtcgagttcaccttgaacgacagtcgtcgcttcagctgcaagttgttcccgaagctcactatgatttgatgatgatgccttggaggttgccgatgttttgatgccgacgcttttcaggaattggtgtgagctgctctgggacaacaccttcgacacaaggtgcacactggatgctggcatctcaccttcagcaataggttcagccctcaaagcctccatatgagactgaaatatcatggacagaaacagtaacatgttaatgctaatgagcaacagcaagatgctgacaataatgtgaaaacagtgactttcatttctagtgcacattatagcagattatagcagttacaaattatagcctacaaggcattaacaaagactatgaaaaatagactgacagactctaaaagctatacatttgatggcaaattatagcagattatagcagttacaaattatagcagatttgcttaaaagctatacatttgatggcaaattaaaagctatacatttgaaagactctataaatagactatgaaaaataatgtgaaaacagttacaaattatagcagatttgcttaacaaagactctaaaacctatacatttctagtgcacgggtcctacaaaaaatagactatgatatttactttcatttcagaaatttgatggcagacaaatggcagacaaaatagactatgatctgaactcccctgggatgggacaggcgatctcactcatcgatctcactccccttcgttccatcgacccacagccaacctccctcatatgatctcataacaattacactaaataaagcaaacaaatgaacttacaagtgcttctcttgccggttcactcaggccacgtttggagctggtatgacaggtcttgaaggcgtccaccgcatctagttcttcagtctgatctaagctgggttcttctcggtttctcttctgcttctgtttcgtggataaacaatcacagcgaagtttgctcagatcaaatgcaatagaagttgagtgcaaaagtgcaggtagtagtataaggtaatagttacttacatatgcatgtaagtgtgccacatagcagcgagaacccgtagcctgatgaaacttgacttgactgcggttctgcttgttcttttcacttatttgctacaagagaatgaacatgtcagattagatcataggttcaatatgcgaagatcctttgcaaacgtatagtgaaagaacaatatatgacaagatacccataccatgttctttggatcagaccactttgcaactaatgccctccactgttcatcagtcatgtaagatacaggagaagttgtgctaatctcatttgcaggtacaccattgaagtatttctgcttgagccgataacgctggttttttaccgcagagcgtagcatatcggtgcaagcttcctttgttgccttgtcctcagtgttaacggacaagcgcccctatgcatatgacaattccatagttagtcaattcaggttaagcagtatacaagtgaaccatagaatcagtaatgcacttacatttagctgtgacacaaagctgttgtagtatttctggtcgtccttgtaatctttccaacgagttaggataggcatggtttcccgaataatgatgccagcctctgatgcaaacttggcagcttgaacaggttcatgtggcctttttttgccttcctcaacagctatgggcagtctcctttgcataactttagtcatcatgtccagttgttttcccttggttgctgccctgggtctccttgtttccagcacattgggattcga

SEQ ID NO: 5 - DNA, 127818 bp, Zea mays
gcagctggccaaaagctcagagaagtaagccgcatgttatttcccgtatgcacgtgtgatgcgatgtttatttgctgttgtgtgatccacatccggaatggatggaagggacgttgtgatgtttgatgaagtgtggagacaataaggccaaaagttaatacaaatcaaatcaatgttatcggtgtagacgatagtggggggttacacgataacaaaatatgcatttagggtatgtttggatcttgtgacagctaattttagcatattaacctctaaataggccaactaacaaattaactaattgttagctagagggcgggcaaactggtttgatattagcggtttgatcttactaataagtgctaataaatcatataaagagaaaaaatatatctattagctaagtctccaaacataaactagctaatttttactaccgactaatcattagccacggacaaacaataagccacaagaacatggccttagaatctttcccggaaaagaaaaaaaatactgttcgatccaaaactccagcggcgagtttgttccatctcgtgtttcgttccgccggctgcagcgtgccgtgcatcctgcttattaagcgtcgtacgtaatgcagtgaacgtgacatcgtccgggtatggttgcgttatgcccgtctgaatcgtggcgccagctgctcttatctggattttttgctggggaaggttgcagtgtacgctacttctttcctctagatctgccttgttttccggcgtacgtggtgtagaaagcaactctacccgagcaactccaaagagtctatctataatataattttttttggttaaagaaatacgctccaacaatttttaattacatctttaaatataggtatttctattttaatttatcgccagctagaaataaaagtaaggatggatttcaagagcgtgtataagatataataaactattgaagagtagaaaaaatatagaacgtggtttatatttaattgatctctaaatgataatttagaaagtggttttaaaaaaaggctctcaaagagtgtttttgctgtacagcgcaaccgtacatgtgcaaagcttatttataccattctagacctctagatcggttttctatgtacaagatacgatcaagagattacatgatacaactctaaccctataaattataaatatagttaaaagacaaatatgggtgtcactggttgcttgcacggaccatcgttcaagcccaactcagccacctacccttctctttggttgtttgtacctcccattgaaccggactaatctgatgcaaatagccaggccagaccgagcagaatgaaccattttggtcgcaggctagacaccaaaaccgagacctggttttattcatccaattaagaaactaatttcacttttgtgttcttgttatttttatttttatgaataaaactaaatctcacttgctatatgtcgtggttttttgaaccgggagacaataagatttatgttcggcaggggtgctagcgtggactccctccgaatggtgagctacggggggctcgaaggtgaatctgagacaagggattatactggttcaggccagagtcctagtccagtgtagtgcttgacagtagtattgcttggggcgtgttacaattgggtgcttgtgtgaagctgagggatgtcttggatgatggtggttgtcttgcccttttatagctcaagggtatacgttataatgagaacttgtattctattagggtgaagtttggcctcctgcttctgggcctcgtagcccctatgttgttgtctgctgggtcatgcttctatgcctcgtagcctctatggtgtggtctgctgggtcgtgtgtcgccgtatccctgatatggcattatgtctcgtccattcgccaatgggttcctatacctattccaatacagacgtagcggtgcttggtgggtcctgctgagtcacctcgaggtgaggtttagggatgtcttaagtaaagctttatcttccgtcatccctttagcataacctttcatcatgcgtaggcgtatgcctggtacggtgtattgcctcgtcccttctggcgtatggatcactgtagagaccccgatgttgaggtatctaaagctggggttgtccggtcccactggttagcagggatacgtatctagcgtcgtgcttgatagagacccttcggtaccgcttccatggtctggacatggcttggtgatgatctgtcccatcgtgttgtcatggcttgataaaattatgtcgactcttccctctagtagaggtgttcgcctgagcgtcgtttgtcgtcttgtcgggtcgctcggcagccaggttgatcggcagccccgtctcgccggggcgctcggttggtgaaagggaaatgtggccttgagccatttctataagtgttttggtgattagatgcccaacacgtattgtttgagttcttatgtgctaaatgtgtgagaagtgcaaatcaaagaacaaggtatgtttctagacttagtaaattggttttgaatactaacatgtttatgtaagtactagaaacagtgccaagaaaagaagaaaggagatggagaagagttggctatgtacagccaaaactagctcgagcctggcacaccggactgtccggtggtgcaccggacaatgtccggtgccccaggctgctcgacggtgaactggctgctctcaagaattggccgggcgacatggctaaaattcaccggactgtccggaggtgcaccggactgtctggtgagagttcagcgctagcgcccaagcacatcggcgacgaactcgtcgctctcgggaaacgaagaaagcgtcgcggaaaaaaatcactggaccgtccggtgtagagatggcaacggggctatccccgtcggggatcgtcggaacgtttgcatccccatttaaaatatatcccccgttccccgcccccgtccccgctcgcggggatagtttttccccgtccccgtccccgaacggggatatctcccccgacgggtatcccgtccctgacaaatccccgagatgaatatcattccaacatcatgactaatatattttagatgcaaaatgagcaaagatatagtacttgttctcctcatacaatcataccagtaacgattcaacaatcaacataggcatcaagtttaaggtgtcaagcaagcatgtaacatcatcatcacacatcagtcactaccgattacacaaaaggttactggttacataaatagctaatgctgaattgggtgagcacattgcaaatgcatgccttcttgacagttgatttcatgaacttgcacttctccccaggtagttcgactgtacttaaagtgaaagttcctgcaagaatatatatggaaacacagaatagttataatgtggtaaaatactagacacatgaattgattgttcttattttatatgaaccacctgtagcccttcctgcacctcttggagaacagaccagaaggtagcaggttgcccttcatcattcaccatccctacacacacaaacacacatatatgcaagtgtcattttcagctaggcttatgaagtaggaatgatgaattacaagagaaaaggctccaaattgaagagaaagaatatgagctacataagagatatacctttgtatttgtttctgatccaatcttgtgagcacattaaagcctccaacatttgagaagtcaacctactacgatgctcacttaggactcgaccgctggtgctaaatgcagattctgaagcaactgtggttattggaatggcaaatatatcccttgctatcctcctcaaagtagggtaccttgttcctgcaaccttccaccaatctaaaatatcaaatccagttgtatgtatgtccaccatctcatcatccaagtagcgatcgagttcagatttattcctaaaggatgctggtttagtgcttgcaagacgggcactaaaggaagacaagaaccctgaattgcctactgaaggtgctgctgactttgcactactaccacatctaccttcatcttcttccaaattgtattgaagcatcaaatcagccaatgagtttttaaccttttcaacctcatactcacaatttattccaggtgtaccaagtaacacctcaaagcactgaagcaacattatttgtttgaaacgcggatcaagcatagtagcaatccccatcaacccttgaatattagtccaatatttcttaaactttgcttccatgttaactgacattgcctctatcaatggattgccacaagatgaccactttgtaatgttacttctaatatcacaaatcttgtagaagaacatattagcagtcacataattagttcaagagaacagatcagatatgtcattgaacattttaagccttcctataacctcagtagcaaattcccattcttcctcagtgggacagcaggaatattgcttatctacacgagttgctctcatgaaaacagccctatatggatatgcagtactaagcattttgtaggtggagttccatcttgtcttgcagtccaagcttaacttcttatcaatggtaacattaacatacttagctatctcctcaaacttctctactctttttggagtggctgtccaataagctacgctatcacgaatattttcaatggcgtctttcagtgactcataaagtacatcaccaataacatcatgagtgtgagggcttggcacatatataaacctacaaatcacacaagaattttgtataacatgttcacacaagaatttcagacccacaaatcacaattattacctcatgataatgtttcttagtgtccaagattcatcaacaaagtgtgcagtgatagccatgtaacctctcttttggttattagaggtccacatatcactagtgatagcaacccgggatttaattccggtcatgtattgaatggctttcttcttctctaaatcatattgctcaacaatgtgcttcctgaaataaaaagggaatagctttaggaataaataacacatgcacacaacataacaaaaacatgttacaaccatgatattatgtaccttagtgtgtttctagtcccaatcttgaacaacggttgaagggcatgcacaaacctttgaaatccagcatgatcgaccatgcttaagggatactcatggagaattatcatggcagcaagttcctttctagctatgtcctgatcaaatgtgtagttttccactgaaactgtccctgcatctgtggcactaaacctcaaagaagtttgtgacaatgtcttgttcccagccaactttatcttcctaagtgtgcaagacttcaagtgatcatgcaaatgcttagtcccagcccgtgtttcgcctccaagcttggtgaagcaatagttgcattttgcctttatttttccattccatctcactctcttgaactccttccaaacgactgatgtgagcttcctctttgaacctacctcaacaccatcttcttctacacactcctcatcttctatttcaattgcttctgattcattaatagattcatgacgtgattcagcttcaggctatgaactaattggagcttggctactgccaccactctcaattgacatctgaaacctataaatcagtatagatttgctcaatataaatcagcaaatagaaacatttatataaatcaacagatagaaatttcagatacattgtaggcagtaatatctatagttctataccaaataaatatgcagaaaaaacatttgtcatatttatatatgaccctagttgcagattgcgtacttacttgcgtccaggtgtctcagttgcagatttcttcaagcagcgcctcttcgaatccgaagtgttctttgatggtggtcggggaagtagcttcggatcaccaggagtaaatggtttggtctgtttggtgaacgatgacggaggagctttcttgttctcaggcggacgcggtggccgatcagtggcacggtcgtcccttgaggtgggacggacgggggcatcagtagaaggcagaggctgcaaggttaataagaagataggaggaggaagaaggtcttcaccggggggcgtctctgtcttcaacgccggcaactagggatccaggcattgtcgccatggtggtcggtgaagctgttttgcggcggcggccaggagcctgggctctctcgaccagcaggaagcaaactagggttatttgtttattttatatggcacattctcgtacggacagcaggaagcaagtgtggtgtgtgcggtgtgccttttgggctgctaacgaacaacaggaagcaaacttgggtttgggctgcttgcgagttgtaacaagcaattgattagattgggctgcagccattagactggtgaatcccatcggggagcagggacggggacaagtggaacgttccatccctggttcacccgttggggatgatttttagtccacgagaatccccgcggggagctatatcatcccgttatcatcccctaatagatgaaatccccaccggggatcggggatcggggccccgttgccatccctagtccggtggtgcaccggactgtccggtgagttagagccgcccgagccaacggtcaccagcgcaatcagcgggcgacgtgtggcccgcgccaacggtcgattgggcacactggactgtccggtgtgcaccggatagtgtccggtgcgccaaccggtcccaaggcccaacggtcggtagcgcccgatatggaaagagatcgtgcaccggactgctacagttgttgtccggtggtgcaccggattgtccggtgcaccactcgacagaaggcaggaattgccttccaagttggtctccaacggctcctagctgccttggggctataaaagggaccccctaggcgcatggagcaaaatacggagccttctctaagcattctaagacttccagactccgcctccacgcattttctgcctccacgcatttgattgattgtgttagtgatttgagctctgtttgagttgcaaactctctgtgctgtgtttcgagctcaagttttggcttgtgtgcgtgggtgtgctgtgaatttgggtcttgcgtgtgttgctctcctatccttactcttgtgctttctttgtgatctatattgtaagggcgagaggctccaacttgtggagattcctcgcaaacgggaagaatcctcaaaagagaaaagaccgtggtattcaagttgatcattggatcacttgaaaggggttgagtgcaaccctcgtccaattgggacgccacaacgtggaagtaggcaagtgttacttggccgaaccacgggataaaaatcgtgtgtctcttgtgttgctcttctgtgattgttttgttcgcaagagatcgcttcatagcaacttgattaactcgcactaacttttatataatcaagtctgtggctatttagcgtttgattttacaggatcacctattcacccccctctaggtgctctcagtaggcaggttgatcgacaaccccgcctcactgggttgctcaacaatatttgttcggcgagcagattggtcaacaatcccacctcgtcgggtcgctcggcggcgggttggtcgacagtctcgccccgtcgagttgcttggcaggtgggccgatcggttagtgggtcgtccttaggatgccttttgggccttctttgggtacctggttcttaggtacccaacactatatgtaatactttttatttttttggatcatttctcactcagccaaccaatcaaaatctattctagacctggcagaattagttttgattttcaaaggatggacgataagtttaaggacatactacttctaagtgtcttttggagttacgagacactcagaatagtttaggattttatattccctttggtcatactataaaccgggtataaactagtagtttgattcaggtgagtttaatggtttaggtctggtgcgaacttatcaaacttagcactaggtagctatgagaaggcacaagaatcaattggaatctcccccattcacaaatattttgaattgaaagtgaaaatagggtgaagtgattaggtccatgaggacagggattgtcggaccattgagctaggttcggtgtgcccacatgtcactactagagcacaggagaggttttgagagcacctagagggggggtgaataggtgatcctgttaaaatcaacactagatagtccaaacttgttttatcaaatgttagtaaggttaaaaccaagatgctatagagagaactcttcacttgattgttcctttagaatgagtaataaacttaggaacaatagcacaagtgattaagtgagaactctagaagagaaatcaatcacaataaaaagtgacacaagagacatggtgattttatcccgtggttcgaccaatgcatactccacgttgtggtgacctccttcagtcaaggattgcactcaatccctctcaagtgatccaataatcaaccttgagtaccacggttttcttccttagtagatggttcccgtttgtgagaaatctccacaagttggagccactcacccttacaagatcgatctcaatgaaaaccacaagagtaagggagggaaagaaacacacgcacatgctagaatcgcagcaacaatacgcacacaagttaagaagagagcacacaagaacaatgcaacaagttcacaacacatctagtgctcaaatctcagtcacgatgatccgaatgcgtatttgtggagtctaggcgtcttaggatgttcaatggaggcttggtgtattgctccatgcgcctaggggtcccttttattgccctagggcagctaggagccgttggatctccatttggtaggcaattcttgccttctgtcggttggcgcaccggacagtctggtgcaccaccggacatgaaaagtgcccgatttctttcctcttctagcgaagccgaccgttgagcctttggtccccttggcgcaccggacactttccggtgcacaccggacagtccggtgcggcctggtgatcgttggctcggcccacgtgtcgcccgttgatcgcgcagccgaccgttggcgcgggcattgatggctcaccggatagtccggtgcaccaccggacagtccagtgaattttagccgcggcgccctcggttttttccgagagcgacgagttcgtcgtcgggccagcctgggcaccgaacactgtccggtgcacaccggacggtccggtgtacctcaggctggtgcaagtttggttggacttagccaaacttcttcattccaatttcatttgatttgacgagcatcctagcacttagagaaatgtgttagtaccaaaaacaattcaataaggccagattcataccttgattctttgatttgcatttttcaaccacttagtacatattaaacaaaatatgtgttgggcatctaatcaccaaaacaattatagaaatggtccaagggcacatttccctttcaggtttgaggttgttggaccctgaccattgggtccatcttaccaaacgctatagtcagtgcaattagggtttgctctaaggagcatcgaacgctagtatagagtggtgcatcataccgatggttataatgtttgaagacttccaaagagggttcaagcacaccaaaccggcccaacaggaccattggaccatgtgctttaggtaggttgtagctgctagttatagctgatgtctgatatagtgatcttattgtgatcattgagtctcatcaagctatagaggtggtatgagtcataggcctcagatggtctagtgaacccattttactgcaaagggattgtaatgcctagttgggtagtatttattatactgctactcttccatgaaacctcttgttggggacttgtccttaaatgctatgaattaagaacaaggcaacacagaaattgttaaacgttaaagtccttcgtccttcgaagcattacttctcttgggatataatgagtctcggacgaaggttatgaaagacataccttcataagtacaacaaataaacaagaaggattcatataaggtatgggaaataacataagcacttgaatattattattacctcatttctatcttatctttattgaaaaatagaaatgataacaaattacaaatgtaccttcggcttgaaagaaggcaaaagtacaagagtgacgcaaaagcaaatgccaagtcagcgtgaacagtacgggaacactgttcatctatttataggcacgggacgcagcccatgtaaaattacacctatgccctttacatttgctaataactctatagtattccatcaaggtctaaatggccttttcctctttaagtcggtttccttttcccttatcatgccgaagctcctctgcgcatagcttcggctatgtgccatccttcgtattctttatgcttcttcacactgtggttttgacataagtccgaaggtacctgtttatgtatcatactccagaaacattgttaaatcatgtttttgaggaccttcggaagctgaaggcccccaacagtagccccacgcaatattaatttgttagaatgataaattcaaattgcgatatggacgaaggccttaagccgaaggtccgaaaaaacaccttccctttgctagaatagcaatcagtcaatgacaagcggggccctcccacttgcaacacgctaggcctataaataagagcacaccacaagcacaattggcacgccttcttgccatctgctcttgctttcccaatttttagctcttgcgcaccaacacttgcttggttcttaaattttctaagcttcggccttgagagcagttttttagcatttccgaagatgtctgaagataaacaagctgttgctgcaacgaagctgagcctttctgaggagaagaatcttggctttcttgagtcaatagcaaagacgaatacggagaagattactagggagattttagaaggtttatctgaagaaactggtgataatgacagttatgatatagaaagcggcggagaagactccgaagatcgaccttggcgaccaagtcatgcagtttttggaaaatcaactattaaacagagccatcttgacaatatgagggggagatattttcaggatatgtctattgtgagagctaacatcggagataagacttgtcctactcccgaagaaaatgaagtcgtgatcttccgaagcttcttcaaggctgggcttcggttccctctaagcagtttcgtggttgaggttttgaagatattccagatttttcttcaccagattacccccgaagccattataagaatgggagtcttcgtctgggctgcgaggagccaaggcttggagccaaatgcaaaaagcttctgcagcatgcacgaactgttatatgagacgaaaccctgggcaaagagcaatatcataacaattttggctgctatagcttcgtcgctcgctctggctcgagctgccccgtgccaaccttccggaaaagatggcctagggactggacgaaggaatggttttacgtgaaaaatgatttaaaggcacaagaagatattaaagatattatcatgcgtcctatttggcagtgattcggccttcggaaaccgaaggtggaaattgatgaagcagccgaagagtgccaaaaggccttcgacatagtctgctctttcatcgggacgagggatttagtccaggagcacatagccttcagagtgtggccgcttgtagaacaatgggaaatgccgaaggagactatcagcaagtctgacgaaggtgagctggttaggttgaaatacacattcagatatgaaggtaagtttattgagccagatgatgattggctgaaatgcatcgaagcaacaagcgacgaactgcttggaccatattcaaaggcagaagataacacgttatctgcggccttcggagtccggaagaagaagaggctgaatagagttttcgatgctattgggtttatgtaccctgattaccgctacccgctgaaagggcaaaagagaaaaagtgcaacttctgggaaaggtgatgcttcagttgttctaagtgagcccgcgccaaagaagaaaaaggtgaaggtccttactcaccgatcgcgcttcattgaaccggccacagtgcccgaatttggtggcgagacccctatggctactaaagccaaaggacctgctcctacacagaagaatgaagagccagctgcatcgccgaaagcaccgctggccaaattgagtgagccgaaggtcgataatgttaaagaggcagaggtcgagagaaaaaagatatcagaagttacaagtccttcggcagaagtgacagtgccgaaggcacaaaaagatcttatagttaccctgttggggacttgttctcaaatgctatgaattaagaacaaggcaacataaaatgttaaatatcaatgcccttcgtccgccgaaacattatatccacaaggatttaatgaacttcggacgaaggtcgcgagcatagtattacgaaggtttcaccttcataattaaacttataaagataatataaagtgaagtaaaacatgaaacattaaaggtaaatttattgaaaataaatgatttcattcacatatcttattatatgaatttaagatctttgaatacaacatttaagtacatttatacctttgccttgacaaacaataattcccgagtgatgcgttagcaattacaggaatccgtgaacagtaagggaatactattcactatttataggcacgggacacagctcatgaggaattacaattatgcccctcataaaagtttacaacaatgactcagacccttacgggttaaaaagtcattctatctttaagtcggttcgacccttcagcttcggatatgctgtagttccgaagctttgtaaacggtgtcttcgtcatcatgttcaagcagcttcagccgaagctgtttctttccgaaggaccttcggcgacgaagcatggtcccaacagtagccccttcgcggtgctagatcgtttttcgtaacgagcttgatccgtgaaaaaagtctcttaggcttcagaaagccgaaggtccgaaaaacaccttccctgatctcgttgttgagaaacgatagagtttccgagcgcaaagcggtcccaccatgcaggttcactattttggtttttgcggcccaccgttcagcgggtgcgagcaactgtttgcctggtgtaaaaatcctgacgattcaccttcttacctgcagcactatataaacagacgggtaggtgtgaagttaccacagcattcattgctattgcactgttttgctgccaaaatttttaaccatagccgaagcttgactttcgcattcaaacgaagctccagtttggtgtttgcttcgtcagaagaagagcttcggaagaaaaaggttattaatttccaagaaatttttcaagaaattcaaaattaaatggccagagtgcgctctactgctagagttgaacgcgagggagacgaagccgaaggtgcggaaactgttcctatctctgaagcaatgaagcgatctggattgatgacatcagaagacatccctgctgctgaagtagaacaagcagatattgagggggctgattctgacggtgattacaatatcgcagtaccgagcaagcctagccatctggacttcggaaagtcgaccatctcgaaggctgatttcccaaagatggtgaagtcgggctactttagcgaagatgagaaaaagctgattcgctttggtggagaggaaattacccgaagcctcagaaagatgaaatagtgattttcaagagtttcctcaaagctggtttgagatttcctttgaataggatgattgctgatgtgctaaaaaagttcgggatctattttcatcaactaactcataacgctattgttaggcttagtgtttatatttgggctcttcgaagccagggggtggagccatttgccgaaggtttctaccgagtacacgagttacactaccaaaccaaggccagaaaggatggacttcatgaaaattttggttgttacaatttcgcctatcggaaaactacaaaatttcctgtgatcagctaccgaagcaagtggtcggcaggctggaaatcggaatggttctacatcaaagttgatgacgacaaggagaagcttgtacagagtccgcttgaactaatcttcggagaaacccgaccccagtgcaatatgacaccagaaggtccaacccaaacagcgttggctgaattcagaattattgcagagcacattggcaccagggatttggtgcaggaatttctggctttcaaagtatttccaactatgaaggaatggactatgccaaagcttaaaggagagaagaaagagggggagctggtctgactatcctatcattataaattcaagaaatattttaaggcaccctgccaagaatggctcgaaacaatcgaaataatgagcactgaaattcttggaaattactctaaaaaagaagaccaattaatgacagtagccttcggcacccggccgaaatgaaggctaaacagagtacttgatgctatcggcttcgaatatcctgattatggtcgattgggcagagatgctggaggcccgaaaagaaaaagaattgccagcgccgttgacgaagaaagcaccaaagtggccaaaaagaaaaaggaaacttctgaaaagctgagccctgagccgaaggtggctgctgcaagaaaaaggaaaactgcatctctagaaccgaaagcattggttcaagaagaagaaactcctgcgacaccttctgctaccgaagtagaagggattctgaaggtaatgactgaacccttgcctgtcaagctaagtccgctggcgccggaactgacgaagttttttcagaaggacaaagaagcttcggcagcagaaagtcctgcactgccgaagaaacgaagaattattcaaatagcagatgtgattcatcagacgccgccactggcgacagtgtcaaaaattgtttctgtcgagaccgctgaagccgaaggtgccacagccgaagccaccagagtggaaaccactgaagctgaaatcggcgaagccgaagctaccggggccgaagccgagaccacggaaggttcaaatctggaaaccactcttgaagttattgacaatatactcctgaaaatggctgaagaagaagctgttgtggctgcggtaaacacgacaactgaaaagggaaaggagcagatcgacaacattttagaagaagaaaattttaactttcaagatttgcttggacaagagctaacaggcgtggaaaaagaagagctgaaaaaatatgccatatcttgcgggtataagccaggggctacgctatttggtggggtcaacgaagggaagttaagatgccttcggaaccgcaccgaggccaaagttgttagaaccctctccaaaggcgttggcctgccgaaactagaagcggacctctgcaggtatcaacgacaccatattgctggaagcctgctctatgctaattttaaggtaacaaattttattatttttattatatttatttattttttaggtcgttttctgacaaagattgttttggcagagtatacttttgagtaaggttctaaaaatgcaacaagatctcgaagaggagaagaacaaaactatcatcaaagatttggaagaaaagttgaaaattacgaagctgttttgaaaaagaaggacttcaccatccaggaccttgaaatcatggctaaagaacacgaaggtgcattggaaaagaaagactttgttattcagtctatggaaggctccttggctgaggtccaagacgagaataacagtttaaagaatgaattgctcaaacaactagaaaaatctgagcaggagaagaaacaccttgaagcaagtcttaaaactgagatagaaaggaattcaaatttgcaaaaatccttgaagaagcttcaatagaaatgcctaagcttcggcagccaatgcgtgcagcggctgaaggatgtgtttcattctattggagccagctctgaaaaatttacaccttcagctgaaaacttgcccagcacattagaatatattgaaggcgaggttgatgctcttgacgaagttattggtggtcatgctgacttctgcgccctggtagcttctcggggcacagctaccgcttttctgaaggctggctgcacacatggaaaaattgtgaataggccaaacttcagcttatcatcatcagatctgatagatattctaagcctagcccgaagtatcggaaatagatttatgacccaaatttgggtaaacagcgggcggaaaatggcgggtgacgaagctcgaagtcatcttaagccggtaagaagcttatatttgttacttttaccttctccttgaaatttgtacctttcttattctgttctttaatatacataggatgacgaagctgaagtataacgaagctgaagtatgacaaagcggaagtatgacgaagctgaagtatgacgacctgaagcttgatagttgctacaatattctttcctgcaaaaattctcgagagacttttgtaatattattatggaaaaacttatgtaaatttgtacataccttgtaatatattttgtttccgctatctgtgtacaatctgctttgttgtggacgaaacttcttttttgagtcgaaggcgaaaaacaccttcccttcttttcgtacataacgaagcataaaaatttttcctttttcgaagtctttcctcattgccgaagcacctatcttttttgtgtggtatgatgattctatatatgtctaaatgaatgtttatgaatgcaaatgacatgatgaaatgtattgtggagatgaatattgggaatgattcaaatcctttcacttttcagcttcatcgtttacttttcggtgtattagcgttgacttttcactgtaagcctcccttaggagcttcttcgccttttactttcagcggaatcaacgttgactttttgctgtaagcctcccttaggagcttcttcgccttttactttcagcagaatcagcgttgacttttcgctgtaagctctgcattcccttaggaacgacttttgagcttctccctgttttcttttcttttcccttggcatttacatttacattttttgggggatatcacttttatagaattgaaataaggaaaagaagaaatacatgttgtggccccattaaaaacctttctccccctttggaaaggaaaagggtgccacaaaaaagaacagaaaaaattacatcaaattaaacataatatcgccgaagctcatccgcatttcatgacctagggatgtcgttgccgtccatatccttcaatctataggaaccgggtcttgacaaagatattaccaaaaaaggtccttcccacttcagctgtaatttgctcactgtctcagggttggctactcttcgaagcaccagatgtcctggttcaatgttcttcagcttaacctttctgtcccgccattttattgtttcggcttgatatttattgatgttttctgcagcttgaagtctgatcccttctatggcatctttttccacagagcaatcagcttcttcttcaccttctgccgaagctaccgttcttattgatcctgctttggcttcttccggggttattgcttcatccccaaacaatagtttgaaaggcgtaaagcctgttgatcttgacatggttgtgttatggctccacaccactttgattaactcatctggccactttcccctgggctgattgaagattgacttcattattcctgtcattatgatcccgttagctcgttcgacaagtccgtttgactccggatgtcgaactgatgcaaaatagatcttcatgccaatttgattacaaaattctctgaaagcttcagaatcaatctgtgttccattatccacagtaattgccttcggcactccgaagcgacaaacaatattttgccaggaaaacttttgaatagtaaccgaagttattgtggctagaggctttgcctcaatccacttagaaaaatattccactgccactacaacatatcttaagtttccctgtgctggtggtaatggacctagtaaatcaaggccccacctttgcaacggccaagtaggttgtattaattgagttaaagacgaaggttgtttttgatctcttgcacatttctgacaaccttcgcacttttggactaaatccgctgcatccgaagctgcctttggccaatagaatccttgacaaaaaactttcccgagcaaaggcctagatccaatgtgagatccacacaggcctgcgtgtatttccttcattaattctatacctttggatctggataaacacttgagcaatggggaacagaccccacgcttgtatagctccccttttattatgacatatggtcgagctcttgcttctattcttctgttataagcttcgtcgtctgaaagaaaattaccctgaaggaaagagataatttcagttctccaatcttcactatacacaggggatatattgaggatcactctttcaagaagctcgaccaaaggtgcttttattgtttcgaaaaatacttccgaaggtaaaggcagcccctgtgctgctgacttggccaatagatcagcatattcattttctccacgaggaatatttttaacagagaatccctcaaaggaagcctcaatccttcggactgtatctagatatttttcaagcttcggatctcttgctttatagctcttgtcaatatgactagaaataacttgggaatcaattttaaggatggcccttctgatccccattgcttttaacttccgaagacccaagagcagagcttcgtattcagcaatattgtttgtacaactgaaatcaagtcttgccacataacaagttttaactttggaaggtgaaaccaacacagcagctgcccctgctccgaaggttccccaagacccatcacaaaacactgcccatgcttcgacatctttattcgtttcttcctcctgagcccctggcgtccagtcagcaatgaagtctgccaacgcttgggactgaatcgaagatctatggacataatcaatacaaaattcattgagctctgtagcccattttccgatccttccagtagcttctcgatttctcataatatccttcaacgattgtgaagaaggaacaactatgttgtaagcttgaaaataatgccgaagcttcctggagaccatcaaaacagcatacagtactttctccaattctgtataatttttctttgataaactaagaacttcggatacaaaatatattggggcctgcttcttgacttggccttcaagcttctcctggacaagcgctgcacttaccgctgagtgtgaagctgccacatataataacaaaggagcccctggcgttggtggagttagtgttgttagatttatcaaatattgcttcagttcttcgaaggctctctgctggactggtccccattgaaaaacttcggctgacttcagcacttcgaaaaatggtaaatttctctctgctgatctagatacgaatctgttgagagatgccagccttcctgtcaatctttgagcccccttctttgtgcttggtggttccattcgaagtatagcttcgattttgcttggattagcctcaattccctttgttgaaactaggcaaccaagaaatttccccttcttcactccgaagacacatttttctggattcagctttaaaccagcctgtctaaaattagcgaaggtctcctgtagatcaacaatgtgattatcttgcttcgtgctttttacaatgatatcatcaacataagttagcacattcctgcctatctgggaatggagaactttcgctgtcattctgctgaagcttcctccagcattcttaagcccctcaggcatccgaaggtaacaatatgttccactaggggttatgaagctggttttcggttcatcctccttcatccagatttggtgatagcctgaatagcaatccagcagactcataagctctgatgaagctgctgcatcgactaaggaatctatccttggcaatggaaactcgtccttcggacaggccttattgagatcagtaaaatcgatacacattctccatttaccattggccttcttcaccataacggtgttagccaaccattctgggtattttacctctctgataactccggcactgaggagtctcttcacttcattccgagcaccttcggccttgtcatcggacatcttccgaagcctctgctttctaggtctgaaggatggatcgacattgagcgagtgctcaataacatccctgttaacttcgcaaagatcattagctgaccaagcaaaaacatctttattgttgaacaaaaaccatatcaaggtcttctcctgttcttcggacagttgagatcccaatagcaccttctgctctgctatgtcctcacataagagcatgggcttcggctgatcagccgaatcagctttttcccttctgaacttgtattgctcacaggcttcagctccatctatattatggattgcttttgagtctgtccaatttccttcggctcttctggcagcttcctgacttccatgaatagcaatgggcccttggtccgaaggtatcttcatgcaaagataagctggatgaagaattgcttcgaaggcattgagagtaccacgaccaatgattgcattgtaagggtattccatgtcaacaatatcaaatacaacttgttcagtccttgtgttgttgataaatccgaaggtcactggcattgtgattttgtcgagtgctacaatctgccttcctccgaagccgcaaaggggatgtgtggcatcatgaattttgtcttcgggctcttgcatatgtctgaaggccttagcaaatatgatatcagctgcactgcctgtatcaaccaaaacattatggaccagaaatcctttgatcacacacgagataaccatagcatcgttgtgttggtaatccttgagttgaagatcctcttgggagaaggtgattggtacgtgagaccatcttgacttgatgaagggtccttgcaccccgacatgttgtacccttctctgtgcctccttcttctgcttcttgttggctggctctgagcatgaaccgcctgttatcgggagtaccaacttcggggccgaagcagctccagcttgaatgttggacgaagccattagctcgaaaaagtggaagtgagttcaccggaggtgggcgccaacgttggggacttgttctcaaatgctatgaattaagaacaaggcaacataaaatgttaaatatcaatgcccttcgtccgccaaaactttatatccacaaggatttaatgaacttcggacgaaggtcgcgagcatagtattacgaaggtttcaccttcgtaattaaacttataaagataatataaagtgaagtaaaacatgaaacattaaaggtaaatttattgaaaataaatgacttcattcacatatcttattatatgaatttaagatctttgaatacaacgtttaagtacatttatacctttgccttgacaaacaatgattcccgagtgatgcgttagcaattacaggaatccgtgaacagtaagggaatactgttcactatttataggcacgggacacagctcatgaggaattacaattatgcccctcataaaagtttacaacaatgactcagacccttacgggttaaaaggtcattctatctttaagtcagttcgacccttcagcttcggatatgctttagttccgaagctttgtaaacggtgtcttcgtcatcatgttcaagcagcttcagccgaagctgtttctttccgcaggaccttcggcgacgaagcatggtcccaacataccccgaaaaggaaaaggatggtccacgtactagatgtactggaggaaataaagactacaagctctactccaagaaaaacaaccgaagtttcaaaaaacgcgaattgaaacaaaacaagctggagccgaagctgcaaaaagtcatgccgagtccgaagctggaccctcagagcccgccaggaagaagtccctggaagaggaagctccagaacagactctgtcagaaaaaactgccactcctactcccgaagcatcttccgaaattgtcgattatattgtacgacatgctttgggaaaaaggttgtctgaaaaagaaaagcgagaagctcaattttatgcccaaaaattgaaatatccaaagggggcattgatttttaatggcagcggagaagaagatttcttgtattgtctcccagacagtaaggaaatttctgtctgccgggagatgggcaaaagcttcggattcccgacgttggaagatggactttcggtgctatcgaaagatgaactggcggacagcttagcatataatagcctaaaggtaaaaaaaattgttatattaaaaaattgagatttattttatttgcttatacttaatttcatacttctttcgcagggcctcattcttagcaacgccctttgggcacaaaaaagtgccgaagatgaagggtgtagtatagccttgaacaaccttcgttccgaagtaattgaactaaggaacgaaggtcttaaaaaagataagattttaaactcattgttaaacagaataaaagaagacgaagctactgccaaagcccaagctgaagcccagagaagcgaaattgaggatctctggaaacaactggcagaggcaaaattaaaatgtgcaattgccgaagctgaccgggacgccagtaactattggaaaaattattgggagaagacagttgtagaactttggtcttcaaaagagaaatgctacgaaaaatccatagaatgtgtgcaaaaaataaaatccagcttcgctaatgttggcgcattctctagcgaggacaacttcgtaaggggcgatcctgaaggcctaattgattggatcagcaacgaagccgaagcctttgaagaaattttgagtggtctcggggatgtctgcgccttctcaggtgccaggggaatcatggctattttggagaaatcaggctgtgatcacgtgaaagctttggctcaaaccgaagctaccttatctattgaagatacaaaggacccctcggccgaagcaagcttagttggcgggaaattctttactgacatctgggagaatggcgaccgagagatggtgcacgagataataaaaaagagtgaaaaagattctcatgatgcaaaaaagcgatgaaagcagttgagaaagccgcggatcttgaaaggtggataggtattgcttaataacttttaactttatattttatttttgtgacttcagacttatttatgttttctatcgtagctgagctatctccttccctagagcccttcgggccaacggtcgacccagaagcaaagaaagaggaagaaatcactaaaatggccgaagctattttggatgaagccatctctcgactattaaacgaagctgcggaagcagttttaaaagaagaatagttgttattgtaaaaacatttggaatgtaatatttgctgaacaaagtgtgtaatatttttataatttgaatgtaatatataagctgctcgtaactcaattctttacgatgcatgaaactttacgtacataccgtttttgagccttcggcgaaaaaacaccttcccttcttttcatgcttcgtgaagaatatccatacttcgtaaaaacattatgcttcataagcaatagatctctttttcatattagagttgatgaagttgtacttgttcaaaacttattgtgccttggcactgcttcttcgaaacaatctcgaagatcaacattgtatccccttcttgtgttattgatgcaatatgatgttatgctatgcaaaatgatgtgatgatgttatgctatgcaaaatgatatttatgtcgaagatacataaacattcccacagtagagcacacaatctttttgccgtttatttttcggcttcaccgcttatttttcggtgtatcagcgctgacttttcgctgtaagcctcccttaggtgcttcttcgccttttacttcggcggtatttgcgttgactttttgcgcttcgccttatacttcggtggaatcagcgtttatttctcgctgtaagctctgcattccctttggaacgacttttgagcagaaaacttacgctgcgctcccttagaaatgactttttgtaacttcggcaaacttacgctgcgtttcatagaacgacttttttgtagtttcggagatactttctgtagccacaagttcttaagaacgagttttcatgcttcatcaactttttgaattccgtaagtctgtggagaagatatattttcactatgacaaaaacaaagctgttacaagaaattgaaaacaacaagaaaaacttaggctttcaatgattgttctttattaaaaagaaaaatgataactaatgcaagaactatttcagaagtaggatatctgttagtagatgtgctttgactctggcacaatactgttgactgtgcgagcttcggactcctctctgaagtctcgttgctgatgagtgtgctggctcccttctggctgctggcctcgttgtattggtggtggaggtggaagctgttgccaagatgcctgaggttggcttgccgaagcaacagaagctgcaggatggttacccttacccacatactctggaatgtacggtgagtggtacgaagcagtatgcataacttgcttcggctggctctgttgggctgcagtttctgctatctctttctgtttctggatggtgacatggcacatcctggtagtatggcccttgtcctcaccgcagaatagacaataaattttcctgggctgatccccaaaccttcctccgaagcccctggctcctctgccccttggggctggaggccgaggataactctgttgctgccccgaagcctaggaggaatattgcggcctctgttgctgacttcccctgtcgtcattctgagtggaatgaattgatctgacatgtctagggtgtactctccctccgaagcccctggtcatctcggagaatctgtaagaaggcccccaacacctctctttcccattcgtttaggtgagaaaacacattggggagcactagggagttctttcctagtgaggcgtctgtgatttgataatcacaagattaaggatttcattagtgcatgtgtagtagcaagtgtgcatccaccttcctcattaagcttgtttaggataagccagagtttgtgccggttactcttgatgttcaacaacaccaagatggcttggtggtaattaagagcttggtgatctctcagtggtgctcgtgagagtcccaactcattgtgtaataaaagattataggtgattcaccatgccggagtggtgaataatcaacccgtagagagcattgagtccttgaatggatcgatggggggctacacccttgtgtgggtcaagtcagagttttagcagttcttgcacccatgatctcatcgtgaagcatagataaatttaaattcttttgaattatttatatatgacaacactattcgtcgctctaggtgactatcacctaccctaaaatgacttaacaaatctttattaattgttaagtcattcacatttttgttaatccactccaaagtcagggtgtttagtgtttttacatccatgtctccttagactcacggtgtctctcccagattctctctcaccctcacctctctctcactagccactagggaacgcaacacccatcgatggctcttcgccccatgaaacgttcacacaatcgcaattgtcgaggcatgcatggctgggagagcagacatggaggcatacgtgctagggttgcacatgggcaagagggtgggtgtggctattcagatatgcatggtgagcaagatgggtgaggttgtgggcatgatgaggggataaggaagaataagatctcttttgttaggctgtctccagcagctatcgtatcccattccctatcgcatcccctattttaaactttactatgcaaacaatgtaatatatagtgcagattccctattttacacaatgtgttgtagacaaccttggagctcttgcataaaagctctagttttggctctagctcctctgagaaaacaatccccaccatgtttttaggaagaatccctgaagggcaccccatttggttggaaatacatctcctcctacaggattatgtttgacttttttttgcaatgtgggacccacaggggagaggaggacgagaaggaaccggagagcctattttttgggctcctggcttcgcttggtttctaggggcggctccttcctattttcacaaaggagctagtagaggagcctcccatttcatgattttttgaaggatctatttaaggagccttgaaagagccctaccaaggtaggcctagaaataataaaggaggaaaaagagaaggtatcacaacttttgtctacaacgtgaaaatgtttggctaaatagataaaacagtttgaattttatcgattcaattgtttattgagggcatgtttgggagggctttagttctagcttctttcgcgaaaaatccagagccctacaaaatgacgtttggtaaaacgacttcttccgaaaaacacccaaaaacccaagatattttatactacgaaggaaaggtcacacatcctagttagcttcactggttctagctccttccaattttgcaaaaaagtcacaaaggataagccattttttcaaatgatttgtgaaatgcctacgctaaaaagtctacttttccaaaaaaactagagctagagccgtttttggcaagtcagaaccctaccaaatagtccctcagtttaagcaaagtgaggctatactgaagctaaattatgccaaattgggcctacatctccatattttcaaccaaatgctttagggtttcttgtaatcgacatgatttgtttcttcataaatagtatatggaccgctccaaaatactccatccgtttcaatttatattacgtttgatctttttaccctaaatttgatcgactcgtcttattaaaaaagttcataactattaataatctttactgtgatatcatttagcatataatatactttaagtgtagctttgattttttttttgcaaaaattaaatgaaacgacccaatcaaacttgataaaaaagtaaaactaattataaatttggacataaggagtaggagggtgtttgaatacactagagttaatagttagttgtcttaaaatttgctagtacaattagctagctaacaaatatttaggtaactattagctaatttgctaaaaacagctaatagttgaactattagttgaactattagctagactgtttggatgtattcaactaattttagcagctaactattagttatagtataatattcaaacacctcctaattaaaatggacaaatatctattcccttggtcccttgcgttagattttccatatatcctcatttagtataaaaagaatcatcaaaaagtggacaacccctagtggaacaccattttagtagtggttgcatgaaacctttcgcgcatcagttactatgtgtcactctaaaaatggggcagcatgtacgcagtgcctatatttatacaaggcatctatcgttgcctcctcagttcatcactaatcacacttattgtgccctcgacgagtatctagctagctcattaatcgatcaatcggggtgtgcggtcgaaggcggcaatggcgagctactcgtcgcggcgtccatgcaatacctgtagcacgaaggcgatggccgggagcgtggtcggcgagcccgtcgtgctggggcagagggtgacggtgctgacggtggacggcggcggcgtccggggtctcatcccgggaaccatcctcgccttcctggaggccaggctgcaggagctggacggaccggaggcgaggctggcggactacttcgactacatcgccggaaccagcaccggcggtctcatcaccgccatgctcaccgcgcccggcaaggacaagcggcctctctacgctgccaaggacatcaactacttttacatggagaactgcccgcgcatcttccctcagaagtgagtccgatgctgccgccattgttctcgcatccatccagcatcgtacgtcctctatacatctgcggatgatcatttgcgcatgtttgtggcatgcatgtgagcaggagcaggcttgcggccgccatgtccgcgctgaggaagccaaagtacaacggcaagtgcatgcgcagcctgattaggagcatcctcggcgagacgagggtaagcgagacgctgaccaacgtcatcatccctgccttcgacatcaggctgctgcagcctatcatcttctctacctacgacgtacgtacgtcgtcacgaatgattcatctgtacgtcgtcgcatgcgaatggctgcctacgccgtgcgctaacatactcagctctttccgatctgctgcgccaatttgcaggccaagagcacgcctctgaagaacgcgctgctctcggacgtgtgcattggcacgtccgccgcgccgacctacctcccggcgcactacttccagactgaagacgccaacggcaaggagcgcgaatacaacctcatcgacggcggtgtggcggccaacaacccggtaactgactagctaactgcaaaacgaacgcacagactccatgtccatggcggcccacaaggtcgatgctaattgttgcttatgtatgtcgcccgattgcacatgcgtagacgatggttgcgatgacgcagatcaccaaaaagatgcttgccagcaaggacaaggccgaggagctgtacccagtgaacccgtcgaactgccgcaggttcctggtgctgtccatcgggacggggtcgacgtccgagcagggcctctacacggcgcggcagtgctcccggtggggcatctgccggtggctccgcaacaacggcatggcccccatcatcgacatcttcatggcggccagctcggacctggtggacatccacgtcgccgcgatgttccagtcgctccacagcgacggcgactacctacgcatccaggacaactcgctccgtggcgccgcggcaaccgtggacgcggcgacgccggagaacatgcggacgctcgtcgggatcggggagcggatgctggcacagcgggtgtccagggtcaacgtggagacagggagcgaggtacgaaccggtgaccggagaaggaagcaatgccgatgccctcggtgggctcgctaggcagctctccgaggagaggagaacaaggctcgcgcgccgcgtctctgccatcaaccccagaagctctagatgtgcgccctacgatatctaagacaagtggctttactgtcaatcacatgcttgtaaataagtagactttattttaataaaatataaatatatatatattctgataaccaagattcgaaccctcacttatacacaattttatcttattttttataaaatgagaatggaaaggactaccgtgaacgactatagaaccaatcatactagtttaaaatgctcgtaagctatgacgaacctagtaggccggtgctggaccattccaaaaaacctataaaaataaatttaatattaaattaaacatatggtctatatatcagatattaaactcaaaagaataattattataatttatcttagctaaaaggttgagaaaggtatgcgttaaaaaagagttttaacccatttttatagcttatttgatcgcccgtccacttttagggagcgaggtggtactatgcagaagtgttgcgctgtgtgcgacttactatcatgttgggtttaggtggattctcacgacccaatgatagacgagaagtgtgggagatgaacaaacctacgcatttcgcgtacgacacatgtgtttgaacaacgagttagattggaaaaaatataatgaccttttttgcaaaaatgactacaatgaaaaccaggaaaaccggtgcttcataggagtagagatttgacggtaaattgttacgatctactggtatttgctgcgaggatgtattcgcttggtgaaaacagaattacagagtagcagtagcagggaagacagtagcgagaggagaagaagaaacttgaggaagaagaagataaatgtagttgttacatcctgccttcgccgtaggtctcagcgagcatatatcttcaggtcctccattctgggccctggaatctcacattggccttacgctggcgtgttcctcttctcggcccaactgtagtcttctcttgaggcccaccagtctccacattcctttgttgctgctatagctcctcggacacggctgcttccgcctgctgctgcacctggatgtcttctgaagtcgacttgcgtggagggacagtgctgccattcccctcccgataacacgctgcttgtccccaagcaggcgctcgagggaacctctgacgaagtggaatcaggtcctcccaagttgccagagatggatgcaactcagaccacagaatcaaccgttgtgatgctccattaggcccccatcggcattgtagtactcgttcaggaatttggtggttgtcaaggcgatcaggaagctgtgccaccaccactaaagaacccactgccttcttgagttgtgaaacatggaacacgggatggatagtagaagtaactggaagctccagcctgtaagcaacagatcccaacttagcagcaactggaaatggcccaaaaagcgaaaatctagcttctgatttgcccgaggtgcaagcgatgactgcacataaggctgcataacagccttctcttgcagccactctccgaggataggcacaggagtggaatccaaaatgtcaatgccaaaatgcttgggtgcataaccatatagcacctcaaatggagacattttcaatgctgaatgccaactagaattgtaccaaaattctgccaagtacaaccagtcaatccatttgtgaggacaagcatgcacaaaacatctcaaaaaggtctcaaggcactgattaactctctttgtttgtccatcggattgagggtgataggaagaactcatattcagtgatacaccagccagggtaaacaatgatttccagagctgactagtaaagattttatcgcgatcagagaccatagcagatggcataccatgcaggcgataaatgtgttgcataaaggccttggccaccactgcagctgtgaaggggtgtttaaggggaatgaaatgtccaaacttggagaatttgtcaaccacgacaagaatacaatttttacctccggacacaagcaagccttcaacaaaatccatagtgatcgtttgccaagctcctgaaggcacatgaagaggttggagtaggcctgggtatttcactctctcaggtttagcttgctgacaagtggcacatgctgcaatgaactggatgacagatttcttcatgttcggccaggcaaacaactgcttcagccgatggtaagcgactgctatacccgagtgacccccaacagcagaactatggagagcagacaatatagactgttgaagtgtatgattgttaccaacccaaatacggcctttaaacttaagcaacccttcttgaagagtaaaatgaggaacaacatcttggtcaacaaccaacttagataacaaggtcttagccgaagggtccaacaaatatccatccattaccaaacgagtccactatggtgaacagactgagagagcatgtaatgtgatagcatgttgtcttctcgacaaggcgtcagcaactctattttcatgtccatgcttgtatacaatcttatattgcaaccccaaaagtttagtaaagacttttgctgccatggagtgttaagccattgctcattcaaatgcaccaaactcttttggtcagtataaataacaaactccccatgaagtaagtaagctcgccattgttccaccgcgaccaatatggctaagtactccttctcataggttgataagccttgagtcttaacaccaagaggtttgctgagaacgctaatggatgaccattctgcaaaagtacagctcccaccccattcttgcaagcatcggtctcaatagcaaaaggttggtgaaagttggataatgctaacaccggggctgagatcacagcttgcttcaaggtattgaaggagatttcttgatcttgagtccaaacatagaacacccctttctttcacagtgcatttagaggtttggcaataatagcaaaatgactgacaaatcgcctataataacccgccaaaccaaggaagctccttaactctttaacattggagggcacaggccagttcaacacagcatcaacctttgcaggatcagtatccactccagcagcactgatcacatgacccaagtaagcaatagatgtttgagcaaatttacacttagacttcttgacaaaccagtggtctttttggagaatggtgagaacttgggccaagtgagatacgtgatcgtcaaatgacctgctgtagactaagatgctatcaaagaagactacaacacacttcctcaacaaaagggccaaagaagagttcatagcgccctgaaaggtaccaggtgctcccgacaatccaaaaggcatgactcaaaactcaaattgaccatgatgtgtctagaacgctgttttaaactcttccctaggcttcaacctcacccgatgataccctgaagccaagtccaatgtggtgaaccaacatgcaccatgcaactcatccattaactgttcaaagatggggatggaaaacgggctttgaccgttaaagcattcaaatagcgataatccacacaaaactgaaaagtgccatccttctttctcaccaacagcacaggagaattaaaagatgatgcactgggtctgataatccccgactgaaccatttctgccacctgacgttcaatttcatctttcggagctggtgggtatcgatagggtctgatattaactgggctggcaccagcaaccaatggtatactatgatcacaacttctttctagaggtaaggacataggtttagcaaaaaccgactgaaactggttcaacagctgaacaatttcaggaggaagggtagcctcatcagtcagagcaacagacacttgagatagggaaatctgaaccaacaattcgtcaaccggctctacagtttccccttgcaagagcacttgcacaccatgataagggatcaacatccatcgttgtttccaatgcacttccataggactgaaagtctctaaccaatcaagtcccaatatcacatcaaaggattgtaatggcaacaccttcagatcaaaggaaaacccatacccctaaattgtccattgagcttgagtaaacacttgggagcaagtcataacaccttcattagccactttaacctggagacaagttggtaccaaagtaatgtcggttaacctggaaatcatagtgtgactgataaaagagtgtgaactgcttgaatccacaagaataacgatttcatactcctgtatagaccctctcaacaaaatggatcctttggcccttgatcttgaaacagcctcagcagatagagccaagaagagttgttcctcgtggactgaatcttctgatggagaagactcattcagaaatgcaggcataagatcccagacttcctgcagggcatgaagttgaactgtagtattgcagacatgtcccctatgccatttttcagcacaacggtcacaaagaccacgtgcatgacgataagcacggagtgcagccagtttttcatcagtgcttcgatcagtctgcatgagacgctgcttaggtaaggatctcggcgcactggcacttgctgcagcagtagttggttgaggaagaggcagggtcgtcttgtgctgggatttcgaccaaataccacgatcacccttgcagaattcactccgcataggtggagcagcgacctcatcctgcaaaaaagcgagggaacaggcaatatccagatccatcgacctttgaagcataacaacagcacgcatatcatcgcaaagaccatccacaaaccgtgtaacaaaatataacggatcaaccccagactcatacacagagagttgatctacgagagaagaaaattgttcaatatattgagttaaactacctaactatttgatgcgaaataagtggtgcaacaacagctgatactggtccttaccaaaccgttcgttcatcaattgacacaagagaggccaagacaaacggggatgacgaaacataactgacagaaaccagcacgctactgtaggcgacaagtgcatagaggcaattttgacccatgaattcagatcaacttgatatatatcaaagtaattcttgcactgggaaatccacaaccgtgggtgcaaaccctcaaaaactggaaagggcaacttagacagatgacccagcccatgacccgacatgtcacccgatcgtgcacgagatgcagccatatcaaacatagatccatgaatacgaggtaggggatgaggatgtggcatagtacgcgtacccttgaccaggtcaggaatataggtcatgacaaacccgaatccctgattctggaggtaatgtttgtcgcggtgcccaatagggccgtcggtgtagaagcccgcaagtgtgcgcggtgctcctggctccgggtggggaaggagtcccgaatccattgccgccgactcgataatcgaaagatccatttgtttgttcagccgccaaaggtcgagcttgatgtcatccactgccgcatccacggcaggccgccaggacaccagatccgcctgggattgctccaattttgccacatgatcctctttgttgtggacgagatcgccaaattgtttctcccatttggagtccagcgccacaaaacgcttgtccatctcctccaacacgaatttcatggatggatccataaattcgtgacggtgctgagagcgaatgcccaaaaccgtagtctctgataccaaatgttacgatctactgatatttgctgcgaggatgtattcgcttggtgaaaacataattacagagtaacagtagcagggaagacaatagcgagaggataagaagaaacttgaggaagaagaagataaacgtagttctgttacatcttggcttcgtcgtaggtctcagcgagcatatatcttcaggtcctccattctgggccctagaatctcacattggccttacgctggcgtgttccccttctcggcccaactgtagtcttctcttgaggcccaccagtctccacattgctctgttgctgttgtagctcctcggacacggctgcttctgcctgctgctgcacctggaggtcttctgaagtcgactcgcgtggagagacagtgctgacataaatatagtaatggtgcaacggctatacgacacgtgagggcctaatggcaagctagtgtaatgaaacctctccataaaataaatttaaaattaaattggaccctcctcataaagaataaatttaaaagtagcaagctagtgtgatgaaacccaccaaaaaataattttaaaattaaagtggactctttccgtaaaaaaataaattaaaagttaaagtggacgtattacccacataataaatattaaattgcgatcactgcactttatctttgccaaaaggctaagaatgttgagttgaaatggagacatgcatcttttttaatagctacctcggtcgcttatcctcctatatctagcgatgtggtattattgagaagtgtttactgcatgtggtttcgtgtcatgttgggtttgaatattttctcagggtcatctaaacgataacaacagtcaagaccacgggtcagattagaaagaaattgtggtacccaattttcaaaaaaagaagttgaagtttattctttctttgtttttctctttcgggtcccgtactactggggtttggagttttaggagtcatacatcagtagcagtagaatttttgtttgacttgtacgcgggggtcagaagcaagcgtgggattggttttgggccgttgatctcgatccggcggtgggaagcccacttctttcccccccaaaaccctagccgcccctccctcttgtttcccttgtgcagctgccccccctcttgtcccttgttttggccgccccccttcttgtatcttttggctgccgccccccatctccaccttcctcaagttcttgcagcccaccacaacaaccctagccaccgcccccaacttcccctcccaaggtgcagccccttccccgcttggatctacgtcgtgttggtgcaagtctccaattggattttggtggaaggaaggagggataaaagggggagaattcaaggtgattttgtgattatctttttgtattagtgctgcaatccaattggttatttgtttacctatgcgaatcggtagaggtgttgtccagaaattttgtgggtgggcgaacagcagtagtattatcagtttctggggatttttcgtgggttattagtagtaatcattgtgacaatcaggtagggctttgtcatacctttccaaagagtacttatgcgctaaattcagaggtatattttaggagttatcgctgtttgaaaccggctaggttgctgtccaaaaacagattgcagggtgtgtcttgtgggctgtttggggccatttagatgttggaatttaatcatcgtttgaatacaaaacttgtggggaattttatgtagatggtttgggagttttttttgttaccactactgtcataattttaaagatatgaaattgtcaagcagcgccactgcagttttggtgggtgatggggagagaggtcgctcgcgacgggtttggaatcgtgcgtatgtgcggcgttgtttatgagcgttggttatgtgaatttgtgcactaagttgtgtgtcaaaaacaggtggtggacctccgggtcgttcttagggccttgtccaaatttccggtgaaggcaagtaaaatagtgatggtttataccgttggttgatttatgtgtcctatacttgattacatccatgttaaatgtgttctttctcgtaatccattttgagaattattgcttgaagctaatcatgttttattatttacatatgttgaagatgttgttcgagcatgttatatgcattgattattatttggaaggaatggaattatatatgtttaacacatgttatttggggtggtctcatgttggtgtcatgcatagtgcatccatcattctttgcatggaagtttcttcgcgatcttatggtccaaccgtaccggtacaataagcatcatatgttgcccgagaaggggtatgatgcagcttcatatccttagaggtatggaggcagaagtcattactgcatctgtagccatgtgcattcacgggtgaaatgtggaacctgttatggtggtgtggatattgtggatattcactttgtgtttcattttggaactgagtaattgttatcttgtttacttgctgcaatttgatattcaagaaggaagttgtgaactatgtggttgttaaatcacggtttgtttacattgtcaaattgttatttgatcattttacttgctgagatgtgtcatctcacacttgcattgtttgatgcaggaacttgatctttgcttttgggaaaggagggaagtagcagcacggtcactacatccttaaataattgtaccactgcttagtaatgatgttaaacagtggtttcaagtcaagggggttgattgttatgaaatagtgcgtgccagggaattaataagttctagtccacttggtggctgactttcttttggtttgctgcattcattttattttggtcattaatgttcattactacctttgcatcctggttatacactgtggattacccatcttttacatcatgtataaactctatgtgcctctcgttatgctactttcaagggaggtgctgccgaatttttctttgattcctgtcttcatttcttttattatgttgtttgagtttgtagagagagtatttggtaacactcattgtgtgggagcattgaggtgttacagaaatatagtgacttctttttttacagaagggacgacacgacagtgaactaggcaaactgacataggagaaagagataacgaaaaccttaattttaggctcgaataaaaactatcaccggaaaaaaaacataaaatgctttcaggatatacatggttttggggagaataaactagttctatcaaatccttttttctagtgtgttccaactagcccgttaaggcgttcctagagtcaatctcgttaactactctaaattaatctaggaagataaagatcatataaattacacacaagaaaaagtaatagatatgtgttttcaatctagcaccaatgagtaaatttgtgtatgtgcattttaggcatggattctgtgctaaggggacacaagagttatactggtttggacagaacgtccttactttcagtcttcgatcgcttgtgctaccgacacctgattgctcgaagtggggttgcaagcgacagagagagggaaggatcccaagtctctgtgagtcgtttgtctaatgtatgacctgatcactagaggctctaagttgcttgtttgttcactctctgtgagcctaggggttttcggttgttctcctcaccccttctactagaggttgatcctattccttttataggccaagggaagggtggcttacatatatgttctctcggaagggagcataatgttagggtaaaagaaatggtttcacccctggttaaagtcttgtcgtgtgccgatatctcttcccgtgcgatcgcctgcagtgcctctgaatttgctggggacttttggtccgtgttggtgaaggaagcccgtgcgtcaccattatttatcctcttctccccacacccaccttctgcctttgtggcccgaccgccgaccttctttgtcgttgagtgagctcgtaggacgtcaggggactcagaccaagagtacataggtcatgagtggggctcgaccttagatttggtagggcgtcgaagggatcagacctagcatccttgggtctcgagtgggcacagaccaaggattcataggctacgagtgggaggaagaccgatgtgcacccacactgtgtcctactgcttcacgtaatcaatgtggcatgtacgaggtgtgcggcgagagcaatccgataggcacgtggcgcccgcttgggtggtcccccgattgatccgcctaacccctcgctccagcctccgcttcgcttcacccctggttcaatgcgcagggatcgttccgcagtgaggcggtttttactcgggcatgcgagcttattgttgtcttcctactaaactgtgggaccctgggggcctagggatttgatctccgacagtgtctcttgagtcactttggggagtgtgtctccctttgggctgatttggtgaccagggagcacaggaggattggaggggattgagggggaaattagttcatttccccctcaatcccctccaatccccccgtgattcacttgtcaccaaatcaacccttagtggcttccttagggtcgagcggtgaccattccatttttctcttgtttctcgatttttatgcttggggagcaaggattctctaggggtgctgctggttcttggcccccttctctccggggttaggattaaccctcgtccaggtggtacaggccgttagggctttcgagctaaaacttcgcgggctagggtgtttgcgcactatgccacgcgacacttggctaattctttagtatcagaccatcaggtggccagtgaacgttattttcttcagattgctgaaagggaaatagggttaaccatttcctataattaatttttgtggttgacgaccaacacaaacacatggactaactagtttgtctagaattcatgtattacaggtgcataaggttcaacataaaccaagaaagatatcaagttagggacacaatttaattggagcaaaatgacttgagtgtgctggaaaatggtgcactgaacattgtccggtgtgccagcggagcaacgactccctgggccaacggtcgactctgcaaaagcaatagtgtcgtgacagagtcagaagcgcagaagtcagagggcaccggactgtccggtgtggcaccagactgtccggtgcagctagaagacaaaggtctccaacggtcaactgctcaaaaccctaacgattgcgctgacgtggcgcacaccggacagtgcatagtgactgtctggtggcgcaccgaactgtctggtgcgcccatcgccaacagaattcagccaacagctagaagtggttgggaggctataaatacctccaaccacctcattcacttccatccaagccttctgaaatcttcattcattgcaagagcaaaagcccaacgctccaagacacaatcaaagcaatcaattctctcaaagtccccaaaatcaactctagtgcattagggcttgtgagaggatcaattgtgttcttttgttgctcttatcgcttggattggcctttttcttttcccttctatttatcaagtgacttgtaatcgaagcaagagacacctgtcggtgttttgggtccaaccgcacacccggggttgcccctcaaggtgtttctaggagtaggaaggtgtcgacgactgtagcaaaatggttcgtgccaatcgcacgagggacagtggacaagatttacaggttcgggccgcttagagatgcgtaacaccctacgtcctggcgagtatgcttggtgagcgtggttacaagagggctctctggattgaagacacatagagctgatgtgggtggctaagtaagatagggtcgatcgttctgaaggggtgccccctaggccttatatactcgaccgtggggtagtacacgtggatatgataacaacaagtagctaaaaggtaatgaacctcttgagtttatccctacgtaaccctcgccgacttatccccgcatggctccgttgcatgggggcttcagcgcgggaaagtcgggtctctgttgcgattcactcgctcgacgttgtgggccgtccgggtttgcaccaatccagcttcacgtcgctctgctttgttggttgtttctccccaggctcacgaaagaatgaccttacgatttattgggcccttgggcctttcgtgaggtcttttactcctttagtggacccgggggatatctatcccccaaaagcccccgatctttgggttaatttagaggtaatcagcccaaagatcccaggtccaacttgcgggtgttttgaagaaaaatgacttcctgctgccttctcttgctctgatcactcatttgaccgaagcttggtttcatgcttgtgccttagaggtcggcatttcaatttgtaggattttgaacttcattgggtgcaccggaggtgtacccaatgggtgtagcccccgagctttgagtagattttagaaaataatctactcgaaggtcttccccagaaattatctccatttgtgctcctgcatcttggttgagggttggtcttttaatcttgtcctacgccttagaagtcggcactatctcggcttggaatgataatccatggggtgcaccggaggtgcacccaatgggtgtagcccccgaccttcaaatggattttttaaggataatccattcgaaggtcttcctttcgtgcctctttgctgaaaattatccctttcgtttgtaaaaaattggcataaagctatttgcattatgctttggaggtcagcattatgtcatcaatattttgctgtagaggtcagcatatattttgtctttagcagccgagtttgcaatccgtccatatcttgctaggtgtgcaatttatttgcttctgcgactgattggacgtttgatagacgttctctgtcaagtcttcacgtcgcttctgtcggccatatcttgtactttgctggctatatttggctttcctctgatccttactgatatctcatttttgtcttgaggtattcactgcgtgccctgcacagatgtgaccgttttgaaaaatatactgataattcctgggcgtccccccccaatgggtgtgggcaagggacgacttggtacgctgagtgttttatccggctgcttctgagtagtaatgtgatgggacggcgggtgtaatcatatcctttgcgctgttgactggagtcccaatgggtgtaatgttgcatgaaacgacgtcagccgcctgacgtgtcttcagacgagtggaagtgcttattgaatgctttgcgactgttcagtgaccgcggttggaggtgagcggttgtctttcccttctataaataacaccgttgcccctctggttttttcacatctcttcgctgttctttactgcatccttctcttctctcccgtctgcttccggcatgggcaagagtaacaaacgcaagcgcgagccgactcctccgtctgaggacttcggcgactcggaatactcggaggaggagttctcctccgagtccgagggtctccggctcccgtctctcccccggcgtcgtctgatgattcagacgactcccaggggattgccgcggaagtctggacgtatatccgggccgtcgagcgctccgggctcgagggctcggatgagtcggagtactcctcggatgaggaggactcggacggcggcgaggacgaggatgacgacgacgacgacgacggtggcgactgcgacggtgacggcagcggcagcggcggggacgggagcaagggcagcaccaggggcggcaacagcaagggcagcaccaggggcggcagcagtaagggcagcaccaggggcggcggcggtggcagcagcagcaaggccagtggctaaacgccactggtctttagatattagtgtagtgtagttagaataatgtaatagtaatgtagagtagtatagtgtagtatagtagtagtagtaatgtaatgtagtaataatagggaagcatcaactcgcaaagagttgatttgtaagcttattgtcttcccttaatgaaagaatgacgttggcttcttcttgatgactcgctttgcttgattatggaactgattcttttgagatagtagatgaataacttgggcatcacattgacgcttccagaagtagctgccgagtaatcttgtagtctatatcaacgttttagaaataatgccgagcgactgaacgctatatcagcgtcttagaggcaatgccgagtgattgaatgtcgacgtcggcattttagaagtagtgccgagcgattgaaggtctacatcggcattgtagaagtaatgccgagcgattgaacacgagatcagcgctttagaagcaacgccgagtgattgaaggtcggcgtcggcgttttaggggcaatgccgagcgactgaacactatatcagcgttttagaggcaacgccgagtgattggaaagcgacgtcagcattttagaggtaatgccgagcgactgaacgcgatatcagcgttgtagaggcaacgccgagtgattgaaggtcgccatcggcattttagaagtaatgccgagcgattgaacacgagatcagcgttttagaggcaacgccgagtgactgggtggtgacgtcggcattttagaggtaatgccgagcgactgaatatgaaatcagcgttttagagtcaacgccgagtgatgaggtggcgcatcggctttttggaaataactgccggatgaccacgtggcctgctggggttttggaaataaccgccgggtgatgactggacactttttgaaacgatatctggctcgagaatatctcataagagttgcgcttttagccgcctttgctttccgtgccttagttcttgctttcccgcttccgaatcctctctgccattcgcctcccactctgctcgctggtagaatcgagatggcacccaagaggaagacctcgagctcgtctgctgtggtgattcctccaatcgaccccaacagccagttgcctttcacaggtaaccacatgtccatcatttctgaaactgaacttctccacctcgtatctatcggggttcttcctccgcgagaactccgttcttggcggatttgccatgggtttactgttccgacagaggatacccatgagtccgttgtttacgcccctttccttctccgcggccttggccttcccatctctccctttttccgcggcctccttgatttctaccatattaacttgacccatttgaaccccaattcaattctgcaaatctccattttcgttcatttatgcgaggcctttcttggcatgctgccacatttcggtttgtggaaatacttgtatcattgtcgccctgggatggccgggggacaacatcagttggtcgggggcgccagcttggagatgcgccgcgggaggaaaactgaatatctcgagatccccctcaaggacagtattaagggatggcgcctagagtggttcatagttgagaattatgggaattctctcccctcccggacgggaagacagccggacgttcgcaccccaagctagaccgagtctcccacagatcaggaagtagctgaggcaggtgtgttgctagctgaagttggactgctgaaagagaggggtctgactactgaagctgtggttactgattttgttttcaagaatattcagccactgaaagacagggcctatccatcttatctgtatcgagggctaaccgactcaactcgggttaccaacaggagaattccttctgcagacttggtgagccgacttgaaatgatcctcaggggcaaggtgtcaaatgttggtgctccagtggcgtactcggcctggaatctgcctcctcccaaagccttcaccctttttgtgtcgaatccacccattactgatggcagtttgggccttagagtgcgaccctctgctgaagaagttagtgctttggttgcctcgcttggggagattcctgatgacgaacggcaggttcattttgaggtgcccctgaaccctagtgatgcagagataagcgctatgcttgatttgctagctgaggattcatctgatgctgctcctgctggggcgttggtagtggcgcccctcccagaggctgatacgactttggatgttcagaagcctgtcagtgctcgcccgaggcgcccttgtcgaaccaatcagcctgatccttctgctgatgagcagaagaagaaaagaagacgcctccggcgagtatccagttttgatcaggacgctggtacctcggttcctgctactgaagaagtgcctgcgactggatttactgacgctgaccccaatgggtgtacccaatccgctgttgatcccaatgtgggtgccccatctgttgctgatcccaatgggggtgctgcttgtgttgctgatcccaatgtgggtgccccatctgttgctgatcccaatgggggtgctgcttgtgttgccaatgtggatgatgaggaggaagaaaatgagattcctttgactcggaaaaacagtcggcagttcatcgccagtggtgaaagtagtggagttccctctcctgctttgtctgccctcattggtctgcaagaactgtccctagccaactttgatcagactctggaggatatggtcccagaggacttgttatcggagccagtggatgatggtgcaatggaggcttgcgctgacgtgcccgatgctgggttgaggtcatcccgtgcctcgtcgaccttagagcgcgatctcgagggtcgggagactgacttggatcgccctggtcctatggaagtagctgagggcccgtcaaccttagaggtggttactgcagagagcttggacctcaagaatgttgctgacacatgcccagcccccgagggtgtcgccggggatgacttagctcgggtgaagagtgtaagccactgcccagcccccgagggtgctgccggggatgatccggctcaagtgggcagtgcaaactatgatccagcccccgagggtgcccgagcagggtctccttcctgtacttccatggacgttcatgcgggttctcctccacactctggctgtatggtggtagctcaaaccttggaccagggagtcgctttagagggcagcgtccccgctgatcgagtgtttggctctgttgaaggcaccaagctgattcctactggttcattgcaagctgcttcgggtggtggccttacgcctagttatcaactgatctctcctgatttggggatcccttcgttcttttccaacctccaggtactgtgatgtattttagcttgattttcacattgtatgaactgctgtcattacactcatctgttttcctcatcagactttggtggatgggatggctagccagctgaggctacagggtgcttccgtcccagaagtagcttcgtctcttgcatgttggaatccagtgtcacttcaacatcgcgtctctgaattggaggcaaccaacgctggttagtgcctttttgcttctctttgccttcactgtggacggctttaccttctgaccccgttttgtttgattatctcttgctaggaatgactcggcacatttcaattattgaggaaaaacattcccgagatcaggttgaattggtccagcggtgtgctgacttcgaggagaagtactctcagagccaaactgaactgggtcaagtctctgctgccttggatgacgccaatgcactgagttcttctctccatgctcagctcgattctgaaaaggtaatttacaaaactgtgctttgccttgttgtgttcctattacttgcttggtttttgaaggagttgatttttgctcgcaggaagaaaaacgcaccctcgctgcctctcgtgacagtcttgacagattgtatcgtgattctagcaactcgctgactatcttggagaggagtcaccgctttacaatggaggaattggataatcaacgctgtaagctgcagtagtccacggacgaagtgacccgcctcaagcagttgatatgagcaaaggatgctaccatcaaagaactccgagcttacaagaaatccattgttcaagagttagaaactgctcgactggctgctaaggttgccgaagagacttctgttactctcagagcccagcgcgacagagccatggacaaggctattcgggcgggacgaatcttgatgaggagacccggcgtggttgttcctgaagacataagggctgatgtgaatgctgccccctgattcctcgagtcgcccttcttcgtcggtcgcacctgagaaaaacattgcgaaatagagaaatattttgtgtgctttgagcgcgcggttagcatgatcgagtattagttagaggacatcagttcagcattcgaatgatataattactctcttattgtttcagaattcatcagttcgtaaatttgcagcagtgaaatgacgcgcgatgattatgaagtttgtttgcgggatatagaagtcatcccctgaattgcataggcatgagcatgttgcaccggcttaagtcgccactgactttagccgattgctccgttagtagggcatagtggtcaccccgagttaagtaagcgtgagcatgttgcaccgccttaagtcgtggccgacttaagtcgattgctccgttagtagggcatagtggtcaccccgagttaagtaagcgtgagcatgttgcaccgccttaagtcgttgccgacttaagtcgattgctccgttagtagggcatagtggtcaccccgagttaagtaagcgtgagcatgttgcaccgccttaagtcgttgccgacttaagtcgattgctccgttagtagggcatagtggtcaccccgagttaagtaagcgtgagcatgttgcaccgccttaagtcgttgccgacttaagtcgattgctccgttagtagggcatagtggtcaccccgagttaagtaagcgtgagcatgttgcaccgccttaagtcgttgccgacttaagtcgattgctccgttagtagggcatagtggtcaccccgagttaagtaagcgtgagcatgttgcaccaccttaagtcgttgccgacttaagtcgattgctccgttagtagggcatagtggtcaccccgagttaagtaagaatgcaagtcaatcgtaaacgaactgagtatctttgaaacctcttttttattaatgacatatttccactttacagaatacatcgtcgtcccagcagtttttgaaatacagctagggataaaactttctgaggtgttctatgttccaggagttcccaacttctgtgccatccatctgagtgagacgatacgatccgggccgagtgacttctgctaccatgaagggtccttcccataagggcgataacttgtgtcgtccctcccccgttagaattcggcggaggacgagatctcctactgagaaggatcgttgtctcacagccttgtcgtgatagcgccttagagtctgctggtaccgtgctgattggattaccgcgtttagccgttcttcttcaagtacatcaatgtcctccagcctggtggcctcagcttctgctatgctttcgaagatcaaccttggcgccccaaacttgagatcagcgggtagcactgcctccgacccatagaccatgaagaaaggagtgtttccatgcagggctcggctaggttgggttcttaggctccaaacgacatagggcaattcccttatccactttcctacgaatttttcattcttgtcaaagacctttttcctgagtgcctccagtatcatcccgttggctcgctcaacctgcccgttggctcgtggatgtgctacggatgcatacttgatctgaatgctcttttgctcgcagaagtcgaagaactctgaacttgtgaagttggatcctaagtcagttatgatgctgtttggtatcccgaatctgaatattatgtcttgtatgaattccacggccttagcagaggttaaagaagcaatgagcttgatctttatccatttagtgaatttatcgattgctaccaatacgtgagtgtatcccccttgagctttcttgaaaggtccaatcatatccagtccccagcatgcgaaaggccaagttactggtatggtctgcagttgctgtgctggcatgtgttgttgctttgacaagtattggcaagcttcgcacctctgaactaactcggctgcatcattctttgctgttggccaatagaatcctgacctgaagaccttcccgactagtgttctggaggctgcatgtattccacattgcccagcatggacctcctccagaagttgcttcccagtggacgggaggatgcacttcatgaagacacctgacgcaccccttctatacaatgtctccccaatgagtgtgtagtgagtcgactgcctggcaatgcgctcggccgagttcttgtcatctggttcttcttcattttttatatacttgatgattggccttctccagtcatcagagtctgactcaggttgatctataatgttgcactcttctgtttgatctattgagatactcggctgcagtatttcttgcacgaagactccgggtgggacctgagctcgactggatcctagcttggacagtacatcggctgtcgtgttccggtctctttctacatgatgaaattccagaccctcgaatttatcttccagctttcggacggcagtgcagtattttcccattgaatcacttgaacaatcccactccttgtttatctggctgatgactaccagagaatctccgtataccatcaatctcttgacgcctaatgagatggcgatgttcaatccatggatcagagcttcatactcggctgcattgttggaggccggaaatagcagctggagggcatatttgaggtgctcgcctccaggtgcggtgaagagaattcctgctcctgctccctgtaacttcagcgagccatcaaaatacattcgccacacttctgcagtctctgggttatctggtacttgctgctcagtccactctgatacgaagtcaaccagtgcttgagttttgatggcagtgcgaggttggaactcaatgtcgtgagatcccaactcacaagcccatttggctatccggccaatggcctccttgttgtgaagaatatcccctattggaaagccagtgactactatgactttgtggtcatcaaagtagtgacgtagcttgcgggcagttagaagtactgcgtataatagcttctgaacttgaggatactttttctttgaggggcctagaacttcactgatgaagtaaacaggatgttgcactgggtaggcatgtccttcttctactcgctcgactaccaacgcggtgctcaccacgtgagtcgtgcaagagatatacagtagcagatcttcaactggttgagctgacgtagcacgtcagggtggtttcagtactggtggtgttgtcaagaatttcttcagcgcatctagagcttcctgtgcttctgaagtccactgaaacttatccaccttcttgagtagcttgtaaaacggcaaacctttttcccctagcctggatataaatctgctcagagctgccatacatccagtaagtcgctgaaccttcttttgtgatcgaggtgcttccatcttcatgatagcttcaatcttatccggattagcctcaattcctcggtggctgacgataaacccgagtaactttcctgccggtaccccgaaaacacatttttcaggattaagcttccatctataccgtctcaaactgttgaaaaccagctgtaagtcttcgatgaagttttctgaactctccgttttgattaccacatcatctacgtaggcctccacacgcttgccccagtgatcggctaagcacgtttggatggctctctgataagtcgctccagcgtttttgaggccgaacgacatggaggtataacagaaagcaccaaacggagtgatgaacgccgttttttcctcgtcttccttcgccaaactaatctggtggtatccggaatagcaatccaagaaagacagcacagaacatccagcggtggagtccaccacctgatctatcctcgggagcccgaagggatccttcggtcagtgtttgttgagatcggtatagtcgacgcacatgcgccaatccactttattctttttgagtacaagaacagggttggctaaccactcggggtgtaacatctctctaataaatccagccgcgaccaagcgagctaactcggcgcgaatggcctctctcttgtcgggcgtgaaacgacgtagcttttgccgaatcggccttgcctggggatagaccttcagtttgtgctcggccagttctcttgggactcccggcatatccacaggttgccatgcgaatacatctcagttatcttgcagaaactagacgagcgcgctttcctatttgtcgtccaagctggagctgatgatggcagtcttgcgttcatcagcgaaccccaggttgatcctcttggtttcttcagtcggccgcatagaggtcgcggcctgagcttcgtttgccggtactgcgaggtcctcttcaggcttagagttcgccagtgtcgaagaaaccgccgacggcttggtggtgagggctgcttgaatggccactcggaaacactctgcggcgccttggaagtcggcgcgcacagttatgattccttgcggccttggcatcttcagtatcatatacgtgtaatgagggatggccatgaatttggccagtcccggcctcccgatgatggcgttgtacccgcagtcgaagttcgccacttcgaacctcaggaactcggttctgtagttctccggagttccgaaggtgactggcatgtagatgtggcccaacgggtattccccttccgtcggcacgatgccgaagaaaggagtgtccgactcgtggagctctttgaggtgaactcccaagccttggagtgtccgggggaaggtgacattgatgctgctccccccgtccactagcaccttctttacccggctctctcggatcaccggatcgacgaggagcgggtatttgcctggatggtcgaagttgagccattgatcctcccgagtgaaagtgatcgggtgttccgaccaccggtatggggcgggaggaccggtggtcgccaccagtatctggcggtcgttgagcttttgttgtcttttgttctgctgcgacccatgtccgccgaagatgacgttgacctccctgtcgacgcgtgggaaagctcctcctcctccctcctcctgctgatggggttgtcgtggttcatctggtcctcccctcggcggaggaggaggtagaggttggaagggtcggccgtgtccgacggaatgcttgaagtcccgacagttacgaaaagtgtggcgcatgtccttgtggtacgggcactgggcgtcgaggatgtcgtccagcgtgcgttcgcctccacgaggtcctcctcaggcacgagaggcaggtggtccggcggcgtgtacttcttcgcgaggcctcttctcccatcgtttgtcgggttgctggttcgcgtcgcgtcgtggtgctgccggtgcgggctttgttcctccgatgaggtcctgggcccgctcgtcggcggtgatgtagaggtcggcttcccggaacagctcctcggaggtagtcggcgctttctgtagtatggctcggacgaaagccgagtcgttggatcctctgtagaagtcctcgatcacggccgcctccgtgacctcggggatacgatttctcatggtctggaaccttttgaggtacgaccggagagtctcatccccccggcgcttgatggatttgaggtcccacggttgcgccgacttgtcggagagggactggaagttggcggtgaagcgtcgactgaagtccccccagtcgtcgatgtagtgtcggggtagatgtcgcagccattgcagtgcgtcttgcccaaggacgatgggtaaatacgcggtcatcacgtcttcggacgccccggcagctcgagcagcggtggtgtagacggctagccaaccccctggatcctgcttaggttcatatttgtcgacattggataccttgaagttgggaggccattggatggccctaaggcgcggagtaagagcggacactccgcacgtgtcctcctgtcgtcggggatgatgtctgtcccggggaggggagttgtggttgtggttcctcgaccgtccccgggtggtaccgccagttgaggccgttgccgactcagttctggtggcctggctctgagccgggatgccatgatccctgtcgtactcctcccggcggcgaatctcgttctcatgccgccgttcgcgcgaagcattgatggagcttcgcgcgtctcggcgactgttgatggcgtgtcgtagatcgttcggtgggtgagcaagcggtagaagatggttggccgcctgggtgaacagtcgtcggtagccctcagcgtcgggagtctgaggaagtccatcagctatccgagctagtacccctccgacttcgctcggcgtgttcatagctcgggcgaagtcgggattcaggttgcgcccgaagaatggattctcccggcgttgccttgcatcttgctcggcttgttcctgagcccgtcggcgatcacatcgtcgggagttccttcgttctctgaagacgcgttcttccggagtttctcctatctccgagatctcgtctcgcgagacaggctgctccggatcccgttctccggccgcgtgatgtcgccgaacgttcctgcgtcgattcctccgtcggcgggattctcgttgaggcggttcctctccgggcgcggtcggttcgtcgtcggagatggtgggcgactccactctcccgatgaagaggacgtcggggtagaatggtgctgctgtcgtggcgactttctttccattctcctttgaagccggaggaacggaaagaacgacttgcttttccctggtctccttcttcctcgcgatccgtgtccattcttttgtcggggaagtagacaacggagtcttccgggtcagcgagccctcggcccccgactttccggagacgatcttcttccgaagagctagaggttgcgcctctccggcattttcggagttcgttggaggagacttcttttccggcggatccgcgatacgatgtagaattccctcttcatccgctacagatgagattgtcccgaagcagaatacggatccgggacgcatggtgatcttgctgtagaaggtgacggccattgagctagcttggatcgtcgacacaccccctacctggcgcgccagctgtcggtgttttgggtccgaccgcacacccggggttgcccctcaaggtgtttctaggagtaggacggtgtcgacgactgtagcaaaatggttcgtgccaatcgcacgagggacagtggacaagatttacaggttcgggccgcttagagatgcgtaacaccctacgtcctggcgagtatgcttggtgagcgtggttacaagagggctctctggattgaagacacagagagctgatgtgggtggctaagtaagatagggtcgatcgttctgaaggggtgccccctaggccttatatactcgaccgtggggtagtacacgtggatatgataacaacaagtagctaaaaggtaatgaacctcttgagtttatccctacgtaaccctcgccgacttatccccgcatggctccattgcatgggggcttcagcgcgggaaagtcgggtctctgttgcgattcactcgctcgacgttgtgggccgtccgggtttgcaccaatccagcttcacgtcgctctgctttgttggttgtttctccccaggcccacgaaagaatgaccttacgatttattgggcccttgggcctttcgtgaggtcttttactcctttagtggacccgggggatatctatcccccacaacacctaagtgtgtggtggtccttgtggggtctaagtgacccaagagattaaggaaaaggttcactcagtctaagtgatcgtttgagagagggaaagggttgaaatagacccggtctttgtgacctcctcaacggggactaggttctttggaaccgaaccttggtaaaacaaatcatcgtattcactcgacttaattcttgtttcatttgttttcccctctctaacgtttccttgctattgtgaatttgagttggctcccatacgtcatctgtaatccttgagcaactcctagcaagagagatattcttttggacttgaatttaattctaacgctaacccccgaccttagtgtgtgtttaagtttataaatttcagattttgcctattcacccccctctaggcgactttcaattggtaccagagccagtgcttcattaagagtctaaccaactcgaagtgatgtctggagatcacgccaagagggagatcatgaccggcgaaaaggccacaagcttggggaggactctctcaagggagtccggcaactaacacaagaaggaatcctcttcctccatcaagtcgcatcggagaggtgacaagaagaagaagatgaagaaggtggtctactacgagaccgactcttcgtcaccctccacatcaagctccgagtcgtccagtaatatgccctacgctattccccatatttcaaagcgcgctccattactttccgttcccttaggaaaaccaccatattttgatggagatgattattgcatgtggagtgataaaatgaggcatcatctaaccacactccacgaaagcatatgggacaacattgaatttggagcgcaggtaccaaaggtgggggacaaagactatgactcggatgaggccgcccaaattaggcactttaactcccaagccacgtctatactccttgcctccttgtgttgggaggagtataacaaagtgcaaggtttaaagaatgccaaaacaatttgggacatcctcaaaaccgcgcacgaaggggacgaggtgaccaagatcaccaagcgcgaaacgatcgagggagaactcggtcgattcatcctcaacaaaggagaagagccgcaagccatgtacaaccagctcaagaccatggtgaaccaagtgcgcaacctcgggagcaccaaatgggatgaccatgagatggtcaaggttattcttagatcccttgtatttcgcaatcctactcaagttcaattaatacgtggggatcctagatataaactaatgtctcccgaggaggttattggcaagtttgtgagctttgaactaatgatcaaagactccaaacacattgtcaacttggagcaaggtgccacctccacacccgaggtgcaacccattgcattcaaagcaacggtcaacagaagaagagaaggagtctacatcaagtaggcttccaatcgacacctccaagctcgacaacaaggaaatggcgctcatcatcaagagtttctgccaaatcctcaagcaaaggaggggggaggactacaagccccactccaaaagggtgtgttatcgatgtggtaagtccggtcactttattgctaaatgcccaattctagtgaaagtgacagggacgaagacaagaaagggaataaaaaggaaaagaagagatactacaagaagaagggcggtgatgcgcacgtgtgtcgggaatgggactccgacgagagctccaccgactcctcctccgacgaggacgccgccaacatcgccatcaacaaaggcctcctcttctccaacgtcggccacaaatgtctcatggctaaggatggcaagaagaagaaggtatactctagagccaccccaaaatatactacatctagtgatgagggtagctctagcgataatgaggatgatttactttctctctttgccaaccttaacatggaacaaaagaaaagattaaatgaattaattgaaaccattaatgagaaggatgacatcttggaatgccaagaagacttgctcgttaaagaaaacaagaaatttgttaagttgaaaaatgcttatgctcgggaaatagaaaaatgtgaaaacttatataaggagcttagcatttgtcataattcaatttcaagtcttagaactgagaatgctagtttagtttctaagattgaaaagttgaatggttgcaatgattcaatttctagtcttagaattgagaatgataaattaaatgctaagattgaggaattgaatgcatgcaaaccatctacatgtactgttgatcatgttactatttgtaatagatgtagagatgttaatattgaagctatggatgatcacctttccataattaaacaacaaaatgatcacatagccaagttaactgctaaaattgccaagcatgaactagaaaatgaaaaatttaaatttgctcatagtatgctttataatgggagacgccctggcattaaggatggtaatgggttcctacaagggaaccaaagcaatgtcaaacttaatgcccccaaaatattgtctaattttgttaagggtaaggctcccatggttcaggatagtgagggttacattttatatcctgcaaactatcacgaacacaaaattaggaagattcatactatatgaaacctcacaatgtttctcatcatgcattcatgtataaaaataaggcttctagctctaagcataccactcatattaaaatgcctaaaacgaaaattcctaatgcatcaaatgaacataacatttcatttaagacttttgatgcttcatatgttttaactaacaaatcgggcaaaatagttgccaaatatgttgggggcaaacacaagagtcccgagacttgtgtttgggtacccaaggtgcttgtttctattgtgaaaggacccaagaccatttgtgttgtaggtttatgcatccggtggttcaggttggataatcgatagcgggtgcacaaaccacatgacaggggagaaaaggatgttctcctcctacgagaaaaatgaagatccccaatgagctatcacattcagggatggaaatcaaggtttggtcaaaggtttgggcaaaattgctatatccctgacattccatttctaatgtttttcttgtagactctagattacaatttgctttctgtttctcatttatgcaaaatgggctacaactgtctctttactgatatagttgttactgtctttagaagaagtgatgattcaatagcttttaagggagtgctagattgtcagctatacttagttgattttaatgataatcaagctgaactagacacttgtttaatcgctaagactaatatgggttggctctgtcatcgccgacttgcccatgttgggatgaagaatcttcacaagcttctaaagggagaccacattttaggactaaccaatgttcattttgagaaagacaggatttgtagcgcatgcaaagcagcaaagcaggttggagtccaccatccacacaagaacataatgacgactgacagtccgctcgagctactccacatggatctattcggtccgatcgcttacataagcattagcgggagtaagtactgtctagttattgtggatgattattctcgcttcacttgggtattctttttgcaggaaaaatcacaaacccaagagaccttgaagagattcttaagacgggctcaaaatgagttcagattgagaataaaaaagataagtagtgataatgggacggagttcaagaactcacaaatagaaggttttcttgaggaggagggcatcaagcatgagttctcttctccctacacaccacaacaaaatggtgtagtggagaggaagaatagaactctactggatatggcaaggaccatgtttgatgagtacaagacaccggaccggttttgggcagaggcgattaacaccgcttgctactccatcaaccgactctaccttcaccgaatcctcaagaagacatcttatgaactcctaaccggtaaaaagcccaatgtttcatattttagagtctttgggagtaaatgatttattcttattaagagaggtagaagttctaaatttgctcctaaggcagtagaaggctttttactcggatatgactcaaacacaagggcatatagagtcttcaacaaatccactggattgattgaagtttcttgtgacattgtgtttgatgagactaatggctcccaatggagcaagttgattttgatgaactagatgatgaagaggctccgtgcgtcgcactaaggaacatgtccattagggatgtgtgtccaaaggaatccgaagagccttcccaaacacaggatcaaccatcatcttccaatcaagcatctccaccaactcaagatgaggatcaggctcaagatgatgaagatgaagatcaataggatgagccacctcaagaggaggacattgatcgagggggagatgaagataatgaagacaaggaagatgatcaagaaattaaggatcaaagaccaccacacccaagagtccaccaaacaattcaatgagatcaccccgtcaactccatccttggtgacattcataaaggggtaaccactagatctcgagttgctcatttatgtgaacattactcttttgtttcctctattgagccatataggatagaggatgcactaagagatccggactgggtggtggcaatgcgagaggagctcaacaacttcacaagaaatgaggtatggcatttagttccgcattctaatcaaaatgttgtagttaccaaatgggtattctgcaacaagcaagatgagcatggtgtggtgataaggaacaaagcccgacttgtggccaaaggttattcacaagtcgacggtttgtactttgatgaaacttatgcacccgtagctaggcttaagtcaattcgaatattacttgcctatgctacttaccatggctttaagctttaccaaatgtttgtgaaaagtgccttcctcaatgaacctatcaaggaagaagtttttgttgagaaacctcccgactttgaagatagtgcgtaccctaaccatgtttacatactctcaaagacgctttatgggctcaagcaagccccaagagcatggtatgaatgcctgagagattttcttatcactaataggttcaaagtcgataaagccgatactactctctttactaaaaatgttgcaaaagacttgtttatacgccaattttatgttgatgatattatatttgggtctactaacaagtcaacttgtgaagagtttagtaggatcatgatacataaattcgagatgtctatgatgggagagttgaagtatttccttggatttcaaatcaagcaactccaagagggcaccttcatcagccaaaccaagtacattcaagacatacttaagaagtttgggatgaagaatggcaagcccatcaagacacccatgggaactaatgggcatctcgacctcgacacgggaggtaaatccgtagatcaaaaggtataccgatcgatgagagattctttactctacttatgtgcatctcgaccggatattatgctttctgtatgcatgtgtgcaagatttcaggcaaatcctaaggaagttcaccttagggtcgtgaaaagaatcatgcgatatttagtttacactcctaagttcggactttggtaccccaagggatatacctttgatctaattggtattccgatgccgattatgccggatgtaaaattgataggaagagcacatcagggacttgtcagtttctagggagatccctggtgtcatgggcttcaaagaaacaaaattcagtagctgtttccatcgccgaagccgagtacattgccgcaggccattgttgtgcgcaattactttggatgaggcaaacccttagggactatggctacaaattgagcaaagtccctctcctatgtgataatgagagtccaatccgcatggcggataatcccattgaacacagtcgcactaagcacatagacatccggtatcactttctgagagatcaccaacaaaaggaggatatcgaaatagcttatgtgagcacccacaaccaattagccgatatctttaccaagccattagatgagaaaacctttagcaaacttaggaatgagctaaatatacttgattctcggaactttgattgagacattgcacacatagctaatgaatatacgactaatgtgctttcaagtgcatttctatacttagtcgtagattgaaagggaaatggagttttcggcaaagacaaggcttccactccaactctgacggtatcatttattctttgtcgttactcatgtcactctcattggtatgaatcttcactcatacttattttaccatttaagagaacgtgttaggccccaaagggggagaaaatgcaacgagggctctcaagttctccgtttttggcgattaatggcaaaggtggagaaaatattaagcccaaagcaaaaggaccgcaccaccatttaaaaaaaattcaaaataaatttcacgggtcactagcaaagtctaggtaaaagtagtatagaggcttccatgcatcactatatgatggtgcaccatcacattgccattctcatgaacaccttctttgtgacatgtcatatgtttggttgtatagctagagacatgcaactatttcatacgatctttaaggggcatcatttgaagtacgttatgtggaaccttggtcatcacatcctcatcatcatcattcacaacctcaatgtacctcaatttgccacacactttacacttctcctctttctcattacctttctataaaagcatataaccatctttatacacatcaaccttctcatatggcatgcttctttgaatggtatatgtctttgggcatcttgtgattttccagaaggatatcgctgatcaaatttataagctccttataacatttacttgagaatgcaaacttggactttatagccataagtcgggtcacaaaggcgagggtggacacaattgtgtgttcgtgtattggctcttttgaagctctaaggagctacaagaaccttttaacctcctcggtcattgaatcctctaaatttgggtcatgctatgagagtacatcattaaccaccttttccatcctatcatcatcaattgtatcatcatctatctcttgtgttgttgcttgtgttgtcacttgtgtctcatgctgatgttgtgaattatcatggtgtcaccacatctcgtatcttcatatgaaaccataggtacaaaggtggagtgttatcattctttagtccttgcatttatagttgtggcaatttgtacatgggcataacacatcagtacccgttgtggtttcttacaaactaaagccacacccaacaaattcctaagttcttcaccatctaatcatgagagtgagatccaatcttattttaaccataatacatccatcgacgatcctcactcataatgtaaagggtagagagcatgtgttaccttgtcagcagaaggttgaagatggcccaacaacaccgcagtggcgcagatcaggtggtggcgaggtcgacaacagcgcacatacgccagtgtcctgtgggaaggcgtggcatggtggggtagccacgatagtggtggtgtgcggcaggtgtggaatgcaataatagactgggcgcgaggagggcaatgcatggctacacaacgtgacatgatggtgtgacggtgagaggctgcgcaaccgtagggggcatgcagcatggggcagcggcgtaatcacgatgtgcggcgtgagaagagcagcatgtggcgatgagatatgcgagcaagacggacgcggctagcgggcgcaactcatcgagccttgtggctaggctggatgggtttattccactaagagcaactccagtagttctctaaaagacttcctaaatcaataatttaggtagttaacataaaaactattctccaacagttctctaaatgaactttctaaatttaacaacttgtcatctaacctcattttctctctacatttggcaatcatttaacaactccctaaacaaaaatattgactgcattatgtagtttttgtgacttatttttttatgtggatagatacaaaacaaaattacaacctatatttagagaactattggagaactcacatttttttactccaaaagtcatttagcaacttcttaaatctacgatttagagagctaaaatttacacaactattggagttgctctaactttcgttgactactgacacaacctatggaagtaatttgtggctttcatggttttgttagtaggtaacaaaaataattaattttcatcagtaatcgacacggtcgacaaaaattatgaataacttttatcggttgaacgacgaccgacagaaactatttaattactgtcgactaccctaaatatcgacaataattaacggggccaacgattttttagttttcatgtgttgtataaagatggtcatgcgttgttgtcgttgccaaaagggttaggaataaaaaaacagttcagttgggttatttttaaaatcgtatgtataaatagtaaatggagaatggctatattcaaccatggaatctcttcccaagttggaggctcgaggtgaatcttggagattcccttccattgttttcaaggacaggaaagtaattgttctttttatgacaatttttataggatctttatatataacagatctatgcttctaatgctatcagtcttgttttttgcccttcgtgttcaccaagtgccactattgtttatggctcaattaagaaatgtgttggcggctaaagtggctcttcaattgtactttgggccgtcatttggagcagacaaagctgcatgcaaggcaaaatggcagagatgttgttgttgcattgcattggacctgaatgcgtccaactacaaagggaatgaatatacgtgctgatcaaatggttgctccggtcagattgttagtactagtgcacaagcaagctagtgcggcggctgattccttgcatgtgaaaaagctttttgtcgtcatgcatggtagtagttactcgtatggttctttaattacgcttaggactgtacttggaccggttaaattagattattattagttctgtgaccgagatctgattgccatgaactgtacttgactgtttaatttaactaaaaaatatactatctgatattttcatttctctagatagtcatggagtatatctgtatatgtatatattaaaaataatgtatcttaaagagttaaagcgttttattatttagaagaaaaaaatatttatcatcatcatatattgttgattcaaccgtgtgatcgggacagattcagcctaggcgctaggggtgcttgagcaattaatgagcacccctaccctcatgttgttcatatagaactttcatgaagaatcccttgaaattctaactatagatgaaaaaaagataaaaacgacaagaaaaaagagaaaggaatgaactctctcatgatcctggattggtccctgatcattgacagtgatgactgatatgaatacctatactttgacggcgaccattggcctacgatctgtatctcctgcacaccgtcacctttacacgcatgcaatggtcttgtggcacaactttcgagatggaatattcctactgtgcatagctaccatacacacacacgcttgtgcaaggttgattcctctgcaggcagtactcgtgtccccctcctgctgattctcgacttgcactagacaaatgcatccatatttatattagtaggcaatcaaacttggaatattcacgagaattaatataagaaattaatcttttccgctttgtggtacaataatgtataaattagtagagttttcagtaaggtacagtagtaggccaaacatatgtacgtcagtacgtgtagtacttgactctacatgatgtacaacattatcactatcgaacacgactactttgtcgtcgagtgtttcagacactcggcaaagctcagaaaacactcgataaactctttgccgagtgtgactttcagtaaagagatctaggtgaattatatatcggcaacgacttctttgtcgaatattttttgtcggacattcggtaaatgttttaccaagtgtcacctgttactcggcaaataaaagtcgctgtcacggcgccaagtgacgatgacgaagcctttgccgagtgtcctccctgacactcagcaaaggctccctctttgccgagtgcctgctggactagcgctcgacaaagaaggctctaacgggtccctttgcgagttcctttgccaagtgcttcgggagccactcaaagggagctttttcttgctgacggcgctttgctgagagccctttttacactctctgcaaagaagtatccttttatgctgagagtttggctctcggccggcagaaactctcttcgcctagtgactttctacaccaagtgtagtatttggcaaagtatgttttgccgagtgcccgataaataactcttgacaaagagctagacactcgacaaagagtcgaatttcagtagtgtatgtaacatttaggacgtgcacttctttttaaaattttgtgacaaacactcctttttttacatgagcgtttgtaaagtacttcctcttttaaattataagacgatttgattctctctctctttatatatatatatatatatatatatatatatatatatatatatatatatatagtcgaggtcttccaatagttacaccaaacctcagccacccgctggaccgtgcctaacacctaggcgcatgcggtaggttgcgtcccaacgcgcatcagtcaaacctccggtccaacacctaccctccagcgtgggacacacacataaattgtggttctgttttttcgcaaatagcgtaaatagttcacagaaaaaacgtaaatagttcataaagatagcataaaaaccccacatagccactagaccacgtccacacgcctaggtgcatgcatgcagatcctattcttatggtagatccgataattatagcaggtcatgggaatttcccttacatgcacgcaaaaatttcatggctccataaatataggatcgctccaactgtcatgcagctaggctcattaaaactagttttatgatatatacttgtcggggaccataattaggggtaccctcaaggctcctaattctcagctggtaacccccatcagcataaagctgcaaaggcctgatgggtgcgattaagtcaggaatcggtccatacgagggactcgatcacgcctcgcccgagcctggcctcggacaagggcagccgaccccggaggatctccgtctcgcccgaggcccccctccagcgacgaacgtgttcccggctcgcccaaggccctgtcttcgccaagaagcaaccctgaccaaatcgccgcgccgaccgaccaagccgcaggagcatttaatgcaaaggtggcctggcacctttatcctgacgcgcgccccccagccgacagagccgaagtgactgccgtcacttcgccgctccactgaccggcctgacaggaagacagcgccgcctgcgccgctccgactgcggtgccactcgacagagtgaggctgacaggcagtcaggcccggtcgaaggcaccataggaaactccgctccgcccgatccagggctcggactcgggctaagtcccggaagacggcgaactccgctccgcccgacccagggctcggactcgggctaagtcccagaagacggcgaactccgcccgacccagggctcggactcgggctaaagtcccagaagacggtgaactccgctccgcccgacccagggctcggactcaggctaaagtcccggaagacggtgaactccgctccgcacgacccagggctcggactcgggctcagccctagaagacgacgaactccgcgccgcccgacccagggctcggacttgggctcagccccagaagacgacgaactccgctccgcccgacccagggctcggactcgggctaaagtcccggaagacgacgaactccgctccgcccaacctagggcttggactcgggctaaagtcccggaagacggcgaactccgctccgcccgacccagggctcggactcgggctcagccccagaagacgacgaactccgcgccgcccgacccagggctcggacttgggctcagccccagaagacgacgaactccgctccgcccgaccccagggctcggactacgccccgacctcagccgacggtctccgcctcgcccgacccaggggctcggactcgacctcggccacggaagacagactcgacctcggcttcggaggagcttccacatcgcccaacctagggcgcagaccagccacgtcaacaggaggcgccatcatcaccctgccccgagctgactcgggccacagggaacaagaccggcgtcccatctggctcgctccgccagataggcaatgatggcgccccgcatactctgtgacgacggcggctctcagcccccttacggaagcaagaggacgtcagcaaggactcaaccgctccgccagctgtccctccgtcaggctccagcactcctccgacggccacgacatcacaccagcagggtgtcaaaatctctccggctgccacgacgacatgtacttagggcgctagctctcctccgctacacacgtagcactctgctataccccccgttgtacacctgggtcctctccttacgcctataaaaggaaggaccagggccctcttagagagggttggccgtgcggggacgaggacgagacacgcgctcgcttgaagccgctcgctccctctcccgcgtggatgcttgtaaccccctactgcaagcgcacccgacctgggcgcgggacgaacacgaaggtcgcgggattcccacctctctcacgccggtctccggccgcctcgctctccccccttcgcgctcgccctcgcgctcgacccatctgggctggggcacgcggcaacattcactcgtcggctcagggaccccccggtctcggaacgctgacagttggcgcgccaggtaggggcctgctgcgtgttgacgaacagcttcccgtcaagctccagatgggcagtctccagcaacctctccaacccgggacgttgctccgtttcgggagtcttgagttcatgtccctcgacggcagctacgacatgatactccttccaccgccgtgcgacaacgacaatggcgaccgacagcctgcccgccggcggcggaatcgacaacgtcttccccgcgtgatggaagaacaacgttcgagctcaccccgtcctctcccctgctgacggaggaggaggcggggcaaccaaggccaagcaggaggcagcgcctcgtcggctgtcgagcgagtcgacgaccccagcgccccaacggggggcgcaccgggcgtcgacctcgcgtttgagacgaaggcgagcgccgtctccccgcgacacgccaatcctgagcaagcggacgacgccagcacgctcgcgaaaagcttgctggacgtcacccttgtacctgagacgacgacgcagtcagtccccgacgtgacctcatcgccgcccgtcgaccaaaaggtaccgaccgattcccatcccacgtctttcggattcagcctcgacccgcctagcggcttcgctttggtgggcgctctcgtagaggcgagtccaaacccactggggtttcgtatgcggtcaccttgggaccggctgacggacgtcttgacctacgggccctctgggtccgaggaagacgacgagcctagcatctgttgggatttctctggacttggcaaccccagtgccatgcgggacttcatgaccgcatgcgactactgcctttccgactgttccgacggtagccgtagcctcgacgacgaggactgcggcccaagtcgcgaatgcttccacgtcgatctggggggtccctccgaaggcaaccatctcggcatgccggaggacggtgatctccctaggccggtgcctcgcgttgacatcccacgggagctagctgtggtccccgttcaggcggggggccatgacccacagctggagcaaatccgcggggtacaggctaggctcgacgagggagcaggagcgcttgagccgatccgtcgggacgtcgggcaggcatgggtgggccaacctccagccggagaaatacgtcatctgccccagggcctccagcaccgcatcgccgacgacgtcaggttcaggccgccacccgcatctagtggggtcggccagaacctggctgcagcagcaatgcttctccgcacgatgccggagccatcaaccaccgaggggcggcgaatccagggagagctcaagaatctcttggaaggcgccgcggtccgacgggccgagagctctgcctcccgaaggcaggggtacccctcggaacctcatgccgcgacttcccgattcatgcgggaagcctcggtctacaccgggcgcacgcgcaacaccgcgcctgcggccccgggtcgcctcggcaacgagcaccatcaccgcgaccgtcgggcccacctcgacgagagggtgcgccgaggctaccaccccaggcgtgggggacgctacgacaacggggaggatcggagtccctcgcccgagccacccggtccgcaggccttcagccgagccatacgacgggcgccgttcccgaccctgttccgaccccccgactactatcacaaagtactcgggggaaacgagaccggaactgtggctcgcggactaccgcctggcctgccaattgggtggaacggacgatgacaacctcatcatccgcaacctccccctgttcctctccgacaccgctcgcgcctggttggagcacttgcctccggggcagatctccaactgggacgacctagtccaagctttcgccggcaatttccagggcacgtatgtgcgcccgggaattcctgggacctccgaagctgccgacagcagccgggagagtctctccgggactatatccggcgattctcgaagcagcgcaccgagctgcccaacatcaccgactcggatgtcatcggcgcgttcctcgctggcaccacctgccgcgacctggtgagcaagctgggtcgcaagacccccaccagggcgagcgagctgatggacatcgccaccaagttcgcctccggccaggaggcggtcgaggctatcttccaaaaggacaagcagccccagggccgccgatcgaaagatactcccgaggcgtcaactcagcgcggcgccaagaagaagggcaagaagaagtcgcaagcgaaacgcgacgccgccgacgcggaccttgtcgccgtcgtcgagtacaagaaccctcggaagccccccggaggtgccaatctcttcgacaagatgctcaaggagccgtgcccctatcaccaggggcccgtcaagcacacccttgaggagtgcgtcatgcttcggcgccacttccatagggccgggccacccgcggagggtggcaaggcccgcgacgacgacaataaggaagatcaccagaaaggagagttccccgaggtccgcgactgcttcatgatctatggtgggcaagcggcgaacgcctcggctcggcaccgcaagcaggagcgccgggaggtctgctcggtgaaggtggcggcgccagtctatctggactggtccgacaagcccatcaccttcgaccgagacgatcaccccgaccatgtgccgagcccggggaaatacccgctcgtcgtcgaccccgtcatcggcgacgtcaggctcaccaaggtcctcatggatggaggcagcagcctcaacatcatctacgccgagaccctcgggctcctgcgtgtcgatctgtcctccgtacgagcaggcgctgcgtccttccatgggatcattcccgggaagcgcgtccagcccctcggacaactcgaccttcccgtctgcttcggaacaccctccaacttccgaagggagaccctgacgttcgaggtggtcgggttccgagtaacctaccacgcggtactgggaagaccatgctacgcaaagttcatggccgtccccaactacacctacctgaagctcaagatgccgggccccaacggggtcatcaccgtcggccccacgtacaaacacgcgttcgaatgcgacgtggagtgcgtggagtacgccgaggccctcgccgagtctgaggccctcatcgccgacctagagagcctctcgaaggaggtgccagacgtgaagcatcatgccggcaactttgagccagcggagacggttaagtccgtcccccttgaccccagcggcgacgcctccaagcagatccggatcggctccgggctcgatcccaaataggaagcagtgctcgtcgactttctccacgcgaacgtcgacatcttcgcgtggagtccctcggacatgcccggcataccgagggatgtcgccgagcactcgctggacatccgagccggagcccgatccgtcaagcagcctctgcgccgattcgacgaggagaagcgcagagccataggcgaggagatccacaagctaatggcggcagggttcatcaaagaggtattccatcccgaatggcttgccaaccctgtgcttgtgagaaagaaaggggggaaatggcggatgtgtgtagactacactggtctcaacaaagcatgtccgaaggttccctaccctctgcctcgcatcgaccaaatcgtggattccactgctgggtgcgaaaccctgtctttcctcgatgcctactcagggtatcatcaaatcaggatgaaagagtccgaccagctcgcgacttctttcatcacacccttcggcatgtactgctatgtcaccatgccgttcggcttgaggaatgcgggcgcgacgtaccagcggtgcatgaaccatgtgttcggcgaacacattggccgcacggtcgaggcctacgtcgatgatattgtagtcaagacgaggaaagcctccgacctcctttccgaccttgaagtgacattccgatgtctcaaggcgaaaggggtcaagctcaatcccgagaagtgtgtcttcggggtgcctcgaggcatgctcttgggcttcatcgtctccgagcggggcatcgaagccaacccggagaagatcgcagccattaccagcatggggcccatcaaggacttgaaaggcgtacagagggtcatgggatgcctcgcggctctgagccgcttcatctcacgcctcggcgaaagaggtctacctctgtaccgcctcttaaggaaggccgagtgcttcacttggacccctgaggccgaggaagccctcgggaacctgaaggcgctcctcacaaaggcgcctatcttggtacccccagctgccggagaagccctcttggtctatgtcgccgcgaccactcaggtggttagcgccgcgattgtggtcgagaggcaagaagaggggcatgcattgcccgttcagaggccagtctacttcgtcaacgaggtactgtccgaaaccaagatccgctacccacaagttcagaagctgctgtacgcggtgatcctaacgcggcggaagctgcgacactacttcgagtctcatccggtaactgtggtgtcatccttccccctgggggagatcatccagtgccaagaggcctcaggtaggattgcaaagtgggcggtggaaatcatgggcgagacaatctcgttcgctcctcggaaggccatcaagtcccaggtcttggcggacttcgtagctgaatgggtcgacacccagctaccgacggctccgatccaaccggagctctggaccatgttcttcgacgggtcgctgatgaagacaggagctggcgcaggcctactcttcatctcgccccttgggaagcacatacgctatgtgctacgcctccatttcccggcatccaacaatgtggctgagtacgaagctctggtcaacgggttgcggatcgccatcgagctaggggtccgacgcctcgacgctcgcggtgactcgcagctcgtcatcgaccaagtcatgaagaactcccactgccgcgacccgaagatggaggcctactgcgatgaggttcggcgcctggaagacaagttctacaggctcgagctcaaccacatcgctcggcgctacaacgagactgcggacgagctggctaaaatagcctcggggcgaacgacggttccctcggacgtcttctcccgggatctgcatcaaccctccgtcaagatcgacgacacgcccgagcccgaggcaccctcggcccagcccgaggcaccctcggctcggcccgaggcatcctcggttcagcccgaggtaccctcggcccccgagggcgagatgctgcacgtcgagggggagcaaggcggggtcacgcctgatcaaaactggcagaccctgtacctgcaatatctccaccgaggagagctacccctcggccgagccgaggctcggcgggtggcgcggcgcgccaagtcgttcgtcttgctgggtgatgagaaggagctctaccaccgcagcccctctggcatcctccagcgatgcatctccatcgccgaaggtcaggaactcctgcgagagatacactcgggggcttgcggccatcacgcagcgcctcgagcccttgtcgggaatgctttccgacaaggcttctactggccgacggcggtggccgacgccactagaattgtccgcacctgcgaagggtgtcagttctacgcaaggcagacccacctgcccgctcaggctctgcagacgatacccatcacctggcctttcgctgtgtggggtctggatctcgtcggccccttgcagaaggcacctgggggctacacgcacctgctggtcaccatcgacaaattctccaagtggatcgaggtccgacccctgaacagcatcaggtccgagcaggcggtggcgtcactagtaagaatgtgatcatcagtgacgattttctagtgacgctggtgacttcagtcacagattgatacatttctatgaccaaattgacatcttcgtcaacaattacaagggacgaagattagacttgaatattaaagacgaaaatgaaaggaacgtcatagatgaaaatgaaaggaacgtcatagattaatttggcttgatcggctgacgtaatgatgaaataaattggtcacagatgagttttagtaaaaaacggcccacgtgtacacaccacttgacggcgtgggatccttggcctacatgggccgcagttttttgggacacagcccccacctggcgacgcggacccggcccagtacgaagcggtagttagttatttggcaaaaaaaggtgcgcccgcggagcttcgaaccagggacctgcgacttgcgttaaattgttgctaccaccagactacgcacttgttcgtgtacataaagaaactatccgtctgttaacaggtgttcccatatgtcgttatgttaacaggttttcccagccgccattctgcgatctgcatggttcgcctgttctgattttttcctgctgcgatctgcgcttctgcgatcggccgtcaggttacggcacacaacgatgccggcgtctgtcgtcgtccgcttgatcggcaactgggtagcgtcgcagcgaacgagcgatcttgtcgcctgatccattgatccaactgtgttggaagaacggcgtcgtctgcaaacagcgaggcagagaagcttcgggcgcggcaaagcagcggcgtcttgcgcatagctacggcaggcgtggatagaacagcggcagggcggggagaaaagacaaggtttgatgtgctgtgtttttgacaataaggttctatgtgcgtttgaattttatttcatatatgcatgtgtttgatgtggttttcaattttgttcagtgtaatcatagttatggagttaatgcgagttttaatttattgtcaaaatagatggatagaagatgggtttatgggaaacaattcacacctgcatatgtgaaaggagttgaagagttcatgaattttgttactgaaagatacccagaagacacagacattcgttgtccgtgcgtgaattgtcttaatcaaaggttgcgacctcagagtgaagtagaaactcatatacacatttatggaatgtcagctacatacacgaggtggattcatcatggggagtcggcagatacagaagttgagggtatagaggaggatgtcgaaggatatgataatgactttgggatacatatggatgtggacgatcatgtttacgatgatgatcatggagtacctgagatgatcggtgaactgtttgcagcggcagaggctgatggagaagaaccaagatttgcaggagttcttggagattcaaagaaggcacttagtctgggttctagccattcaaaattttcttttatggtgaggatgttgtatatgaagtctcgttatcgaatcagcaatacagcattttcagcaatgatgaagctgatgtccgatggataccctaacagtgagttgccaaaatcatataatgaggccatgaaatatcttaaagaattgggccttggatacgaaaacatccatgtgtgcaagaacaattgtgtgttgtttcggaatgttaatgctaaattgaatgagtgcctagtatgcacggagtctagatggaaagatgaaactggttcgaagcgggttccacataaggttttgaggcattttccactgttgccaaggttgaaaagaatttttgcttcaaaacaaacttcagaggaaacacaatggcacaagaaagtgaggaagccagtcgccaatgtgatgagccatccagctgatggggaagcgtggaaggactttgaccgaaagtacccaggttttgcaaatgatctgaggaacctgaggctagccttagctaccgatggattcaatccatttggcaacatgagtacccagtacagtatgtggccagtgcttgtgacaccgcttaatctcccaccatgggaatgcgtgaatccaacaaactgctttatgtctttactcatcccaggtccaagatgtccaggaaaggattttgatttgttccttgagcccctaattgaagaactgctgaagctatggaagggtgtcaagacctatgatgcatgtactggtaggaagttcgaccttcgtgctgctgtactatggtgtatacatgattatccagcgctggccacgttatccgggcgaacaacaaaagggtattatgcatgtatttattgcgacaagaatctgttgtctatggcaataaggaacaagttatgctacattggacatcgtcgttaccttaaaaggacacattcatggcggaatagcttggatttcaatgttaagcgtgaaaacaaagttgtgcctggcaggttcactgtggatgaggtcctacaagagctagagaaggtgaaagatgtcaggccagggaagcaggctgacattactggaaataaaaggaagcgtagtagtgacggtccaaagatttatagccggaaatctgggttgtggcaattgccatattggaaagatttgatgcttccacataatctcgatgtgatgcacatagagaaaaatgtatgtgaaaatattctttgcacactacttagtataccaggcaagtccaaggacacacataatgcaaggctagatttgtatgatatgggcataagacctgaactgcacttgcaataagatggcaactcggcctgcagggctccacctgctccatatgtgttggggaaggatcagaaagtcgagttttgcaagttcctcaaaggtatcaagtttcctgatggatttgcggataacctagcaagatacataagtgaagatggttcaaaggtggttggaaaactgaaaacacattcttgccacatactcctacagagaatcatagccgctggccttagaggactggtgaggaaggatgtatatgaagcaattgcagagctggggaccttcttcagggaactatgtagtagaaatctacggatagatgttgtgcaacggctaaaaggagatattccattgatcctatgcaagcttgagaaaatctttccacctgccttctttgatgtcatggtgcacttgagtgtccatcttcccgatgaggcaatgcttagaggacctgttcagtatggatggatgtacccaatagaaaggcgactaggcactttgaaaatttttgtaaggaacagggctaggccggaaggatcaattgctgaggcatatatggcaagtgataccttaacattttgttctaggtacatgaaggatgttgacactagatttaacaaggatgatgatagtggtacagagatgccattgcctaatgacatgtctgtttttaagcatggtgctactcttgttggagctactaagactgagtacattgatgatgctatcatgaataagttagtttggtatgtgctacataatgctgatgaagtataggaatatttgacgtaagttagtttggtatgtgctacataatttatgttatgtttattaaatttgaaaatatgcttatgaataaagtatgccatgcagtctgtacagggaggagctatcgcagcaaggtgcacgtccaaatgatgttgatcgaatggttcaacaaggatttgcaaagtggtttatgtcccatgtaagtcactaaacttttatgttataggtttactaaagttttgggtatgcatatgtaattgctcagctgagtaattttgttgcaacaggttgagaagaagtgtaatgagaatccagaattggttagcgaaggactgtgggcactgtcatgtggcccagctcggcgagttaagactagtacagcttgcaagattaatggagtgcggtttagcacagtggatcgtgagaagttcatgcagacacaaaatagtggtgtaatgactgaaggtgaacataacggggagaatatagatttttatggtgtccttaaagaggtaattgagttacaatataactcgaattatcaagttcgtcggtcggtggttgtatttcgatgcgattggtacaaccaagtaggaaagactgtgggcattcgagatgacagccatttcaaatccatcaatgtgcagtcattttggtacaagtccgatccttttatcttggcagaccaagcgaaaaagatattttacctgcaagacacaactccacaatgtaaagatttccgagttgtgcagaaatttgaacataggaatatttatgatgtggctgaaaaatatgagggcagtaatgatgtgcatcaggatgattattgttctgatacagagcatatagtgcaagaaggtgatgataatcaggttctgcacaatgttgaaggtggagaagccagtctaattgaaggcaatttagaggaactaataagaaaaaagaaggaagctgctattattcttgaagatagtgaggatgaggaggaagatgatacaatgtttcaatattttaatgatggtggtgacggcaacaatgatgacatgtccatagaagatgaagatgaagatttctagtattgatagttgatttatgaattgttcagttcagattagtacaacatactgaatgtgtgtctgaaattcagttcatgtttagatgatacaatgtattttctgtattttcagaactgaatgtgtgtctgaaatactgaatttggggtgaactgaacttgtggtgaactgaatgtgtattctgtattttctgtattttcagaactgaacatttgaacacttaatatcagagaaaagattgcatggttattactgatactgctaaagagagacataaagtggtaacagactaacagtaatggcaatatggtatagctacctcgggtaacagactaacagtaatggtatggcaatatggcaatatggcaacagactaaagtggtaacagactaacagtaatggtatggcaatatggcaatatggtatagagagacataaagtggtaacagactaaaagattgcatggttattactgaacacttaacatcctgcagaaggcttgatttatatctcattacatgttagcaacatcgactggttgtagttacatattcattaaaatagataaccaacatcagatatacgcagatcaagatagcttggtctctggaagtaaacaatgtatattattaaatattattgtgctttatgaaagaatgttgaggctgctcttgacataaattatgtacctcgacatcagatatacgcagatcaagttggcgatatatgtaaaattccaaagtaaatgagggattttgaatctgcatataatgaacagcgtttaaaagtggaccaaactatgaaaggcaaccatttcttccgcattactgtcaacagtggctttgtatactttagcaaaagcaccagtgccagttgatcctttgatttgatactttctaccaccttgacacaaggaattgtagtggcagtttagaatctgaactttgaactttggactgggcaactttgaactttggactgagcagagtttacaatctgaactgggcagcaatctgaactgggcagcagagtttactcagaacacccagcaatctgaactgggcactttacaatctgaaaatgcagaaatctgaactgggaagtttacaatctgaactgggcattactgtcaacagttgatgcttaactatggactgggcataacaaaaaaatgcagaaatctgaactgggaagtttacaatatgaaaatgctataatttgccactgtgaacagagaacagtttatgcttacatcctggacagagaacagtttatgcttctaatgaacaaacgtgactggtccaatggtaactccttgctactgtgtgctctgttactgggtagaaaaatgcagaaatctgaactgggcgctcggttacatcctggacagagaacagtttatgcttacatataactgctctctgttactaacgaacaaacgtgactagtccaatggtaactccttgctattgtgaacccttgcgtcttgtgttcgagcttgggataggtaggtttttctggttttgtttacatttttcaatcatttttgtatttttcttttatttatttacatgtatagcaccagtttctccaaatcatttcaaccttttttggggtgttgatggaggtgtaccatgatgttttgtgccggtgcaatttttagaattagtttaactattaatgtaagtatttgttattttactaaagaataagtgctaaaaaaccttaggtggctagaaaaatctagaaacttgcatgtacacttcattttggtgtacaatgttgacaaaaaaaatgcaatttattctgacaaagtggtgacatacatcctacaaaaatgcatacagccctcatataaggctaattactaagtgagagatgttcatgcttgtgatggatctatactaccactttctccaaatcattttaaactttaatggcatgtttattgaaccaacctatgatgttgtgtgcagttatgcatttttcagacctagtttactaattactgtaattatttgttgtatttcgtaaagatatttgttacaataccataacctagctagaaaaatctaaaaacttgcatggaccattcattttggtgtacaatgttgacaaaatagtttcaactcattcggacaaagtggtgacacacatcctaagaaaggcatacatctctcatataaggctaattactaagtgagagatgttcatgcttgtgatggatctatactaccagtttctccaaatcattttaaactttaatggcatgtttattgaaccaacctatgatgttgtgtgcagttatgcatttttcagacctagtttactaattactgtaattatttgttgtatttcgtaaagatatttgttacaataccataacctagctagaaaaatctaaaaacttgcatggaccattcattatggtgtacaatgttgacaaaatagtttcaactcattcggacaaagtggtgacacacatcctaagaaaggcatacatctctcatataaggctaattactaagtgagagatgttcatgcttgtgatggatctatactaccactttctccaaaccattttaaactttaatggcatgtttattgaaccaacctatgatgttgtgtgcagttatgcatttttcagacctagtttactaattactgtaattatttgttgtatttcgtaaagatatttgttacaataccataacctagctagaaaaatctaaaaacttgcatggaccattcattttggtgtacaatgttgacaaaatagtttcaactcattcggacaaagtggtgacacacatcctaagaaaggcatacatctctcatataaggctaattactaagtgagagatgttcatgcttgtgatggatctatactaccagtttctccaaatcattttaaactttaatggcatgtttattgaaccaacctatgatgttgtgtgcagttatgcatttttcagacctagtttactaattactgtaattatttgttgtatttcgtaaagatatttgttacaataccataacctagctagaaaaatctaaaaacttgcatggaccattcattttggtgtacaatgttgacaaaatagtttcaactcattcggacaaagtggtgacacacatcctaagaaaggcatacatctctcatataaggctaattactaagtgagagatgttcatgcttgtgatggatctatactaccactttctccaaaaccattttaaactttaatggcatgtttattgaaccaacctatgatgttgtgtgcagttatgcatttttcagacctagtttactaattactgtaattatttgttgtatttcgtaaagatatttgttacaataccataacctagctagaaaaatctaaaaacttgcatggaccattcattttggtgtacaatgttgacaaaatagtttcaactcattcggacaaagtggtgacacacatcctaagaaaggcatacatctctcatataaggctaattactaagtgagagatgctattgcaagtgagagatgtatagtaccactatgtcaaaaatattttaaaatattataacatgatcataaaccaaactaatgtgtccatgaatagataattacaaaaaaacatagagataaataaaaacaaagaattaatataaaatggtaggcaaaacacaaaaaaaaagtctccttgcaggcgcttgaacctaagagctcggtcttaaagttaagaggtcaaaccattgagctatgcatgtgttttcaatatatacccagccctagtatacttaaacgcattagactccgcattgccaaacacattgggcgccaaaaacattttcgtcgtcgtcactaaaacagactccgctctcatcctctatctcccgcactcctcttatttctcccccactcttctttctcccccacttctccaaacctaatcgccgccgccgggacacgacggctgtcgacgacctgccccctcgaccaggtacctcaccgtcgcccccttacctctcatcgcgtcgatgagctgcatcgtcgccgacttcactcgccgcatcccgctctatctcattgccatccgcatttctctcgccccttccacctaacacgccccatccacattgctctcgctaacccctaaaccctaacatcgctggatttgggtcatcgcagacgaccttgatggtgaacaaaaggaggcacagaagtcagaaaggtccaacccctaaaccctaaccatcgctagatttagtttaattattcattcgttgttatcagagatattgtaaattgatttatgtaatcattatgcactgatacagttgtgtttggttccttacattgtattatatgcagtcacatccatgttttagtagagaacttatgtttctagtactggtagacaaggttcaagaaagcgcgattaggcgtgcgattaggcgcggttaagcgctaagcagagggtcaacgcatcgcttacctactaagcgggcaattaagcgctggccctgcttaatcgtgcccattcggcatgtttaagggagaagaggagggagaggaagaggaggaacacctccagggtcaatccagcaggcagcaaatcgacggatcgacgagagagagagaggcggagcggcttcgcggtagaggtgaagatcgcacgagggaggagaggcttcgggagagggagccggagagcgtacggcacggaggaggataggcttcgggagagggaggcggagagcacagggcggcggcgcgaggcgtggaaggaggcagcagagtactaggtcatcacgggagaggggttttgcgttgagcctcctggcaggtgggcctagtgggctgcagactcatgaagagaggaggtgggggttaagggctgctgcagggtggcccaatatcatgtattgttttctctttttaacaaaaatgattaagcacgattaatcacgcttaagcattttcaccaccataccgctcgctcagcgcttagtgctttcttgaatcttgctggtagaaagagatgagaatatcttcacttttttcgttcatcagcttgtgtaaatctacatcgcctaatcaatgtactagctagtactttgaacattgtttaagcctgcataaagatttccacaaccaaacaggggaaacactacagttatagtgcaaccacaattatgaacttgcacaatcataaccaagcttcataatgactgaatctacacatcttatctatttgcttttagtcaaatccttccctgcaaatagtagtacctcttagcttttagtaaaatcctttacattatctaatacacacagtatgcttgttcttatctatcttgcaagtagttcaacatgagcgaactgcttatgagagaagacgggataaacaagtggaggagaatataaagaagatgcaagatttgggtctgaacaaatatacttctgttctaaataattctgtctcaccatctgcatcaacaaaggggaaacatgcagcaaacaagataaataatagttcagattcggattcatatgtctctttctatctccttgacgatgatgatcaaggagatactgatgatgacagtgaatattatgagcagccaaaacccctggcaatgaaggtgctccttctatcttcaaagtagtggatgccaaatagttgcattgcatttcaatgtttttaatctggtgtttaatatatgctcatgcttttagattcatcttctttatttcatacctcttaattaatatatggtcttgcttttaaatgcacatgactattttttgtggacagtatcctagaagaggtagaaacacaacccttgcttcaaagaagaagatagaccccaacatggctccaggcattaggttcagcaagagagtgagggcaggtgcacaaccagaggagcaatcttcaaaaaggcttcactctacagagacagatggccacaatgtacaggaaccaacagatggaaatgatcacataccaaacagccctactacacctggacttgctgatcatttcagcagagctgcagaggaagtcatggcatctgctactcatgacagtacaggtgatgctgaaggcaacagtcgtactgcacctggacttgctgatcatttcagcagagctgaagaggaagacatggcatctgctgctcatgacagtacaggtgatgctcaagccaatgtagctagagatgaagaaactgaaggcaagttctattttttcagtcaaataaggcatctcttttgctgatttgcatgaaacaaaacaatttcattattcaataaaagtgaattatattttgtagctcctacatagcgagcaccaaggagacccagggcagcaaccaagggaaaacaactggacatgatgactaaagttatgcaaaggagactgcccatagctgttgaggaaggcaaaaaaaggccacatgaacctgttcaagctgccaagtttgcatcagaggctggcatcattattcgggaaaccatgcctatcctaactcgttggaaagattacaaggacgaccagaaatactacaacagctttgtgtcacagctaaatgtaagtgcattactgattctatggttcacttgtatactgcttaacctgaattgactaactatggaattgtcatatgcataggggcgcttgtccgttaacactgaggacaaggcaacaaaggaagcttgcaccgatatgctacgctctgcggtaaaaaaccagcgttatcggctcaagcagaaatacttcaatggtgtacctgcaaatgagattagcacaacttctcctgtatcttacatgactgatgaacagtggagggcattagttgcaaagtggtctgatccaaagaacatggtatgggtatcttgtcatatattgttctttcactatacgtttgcaaaggatcttcgcatattgaacctatgatctaatctgacatgttcattctcttgtagcaaataagtgaaaagaacaagcagaaccgcagtcaagtcaagtttcatcaggctacgggttctcgctgctatgtggcacacttacatgcatatgtaagtaactattaccttatactactacctgcacttttgcactcaacttctattgcatttgatctgagcaaacttcgctgtgattgtttatccacgaaacagaagcagaagagaaaccgagaagaacccagcttagatcagactgaagaactagatgcggtggacgccttcaagacctgtcataccagctccaaacgtggcctgagtgaaccggcaagagaagcacttgtaagttcatttgtttgctttatttagtgtaattgttatgagatcatatgagggaggttggctgtgggtcgatggaacgaaggggagtgagatcgatgagtgagatcgcctgtcccatcccaggggagttcagatcatagtctattttgtctgccatttgtctgccatcaaatttctgaaatgaaagtaaatatcatagtctattttttgtaggacccgtgcactagaaatgtataggttttagagtctttgttaagcaaatctgctataatttgtaactgttttcacattatttttcatagtctatttatagagtctttcaaatgtatagcttttaatttgccatcaaatgtatagcttttaagcaaatctgctataatttgtaactgctataatctgctataatttgccatcaaatgtatagcttttagagtctgtcagtctatttttcatagtctttgttaatgccttgtaggctataatttgtaactgctataatctgctataatgtgcactagaaatgaaagtcactgttttcacattattgtcagcatcttgctgttgctcattagcattaacatgttactgtttctgtccatgatatttcagtctcatatggaggctttgagggctgaacctattgctgaaggtgagatgccagcatccagtgtgcaccttgtgtcgaaggtgttgtcccagagcagctcacaccaattcctgaaaagcgtcggcatcaaaacatcggcaacctccaaggcatcatcatcaaatcatagtgagcttcgggaacaacttgcagctgaagcgacgactgtcgttcaaggtgaactcgaccagctcaggaagaaatgtgaagaagctgaggaacagcaggcgaggacacaaagggagttggaggagtacaagaagataacagagaagaacaacaaggagatggaggagaccaatgtgctcatcaagaagctcttgtccttgcatggtaactcttcttcgacatgagggctgctagtcagagctgctgtttttggcctgttctttgacatgagggtacccaaaaactctagttgctcgtgggtgtcaacttttgattatatgctgttatgtttgtgcaaactcaactgaaatgtgaagtcaagtggtgatgctgtgaactgagtttagtgttgtccacttagtttgtatgcgcactggaatactagttgtattcatctatggaatatggaattgtgtgctcattcctctgttctagtatattttgcaatttccaattaaattattctctgcacatctgtgaccaaactggtggcatataataaaacatatgccacgtcagctgccactgtactagccacgtcagcgttgacgtcagctgccacgtcactagccacgtcagcactgacgtcatacgcatcagcaccttccaaatggctgttaatgaccaaacaacggctctatctgtgacgataccgtaccatcacagaaaccaaccgtcgcagacgacgaattatgacggaaaagtgccttcctctatgaccacaactgatcgtcatagaatgaattcacttccatgacaacgcggctttcgtcacagaatgtatacacatcgatgacgaaactgggtagtccatcacaacacaacaaatgtgacacgacccctatgaccaaatcgaactcgtcacaaattcgtcacaaacctttatctgtgacgatatatacacatgcagtgatgcaatacgaacgtcatcgatgataagatctctactagtgcgttcttcaccaacatcatccatcgcttcggggtcccgaactccatcatcaccgacaacggcacctagttcaccgacagaaagttcctggacttctgcgaggatcaccacatccgggtggactgggccgccgtggctcatcccatgacgaatgggcaggtagagcgtgccaacggcatgattctacaagggcttaagccttggatctacaacgacctcaacaagttcggcaagcggtggatgaaggaactcccctcggtggtctggagtctgaggacgacgccgagccgagccacgggcttcacgccgttctttctagtctatggggccgaagccatcttgcccacagacttagaatacggttccccgaggacgagggcctacaccgaccaaagcaaccaagctagccgagaagactcgctggaccagctggaggaggctcgggacaaggccttactacactcggcgcggtaccagcagtccctgcgacgctaccacgcccgaggggtccggtctcgagacctccaggtgggcgacctggtgcttcggctgcgacaagacgcccgagggcggcacaagctcacgcccccctgggaggggccgttcgtcatcgccaaaattctgaagcctggaacgtacaagctggccaacagtcaaggcgaggtctacagcaacgcttggaacatccaacatctacgtcgcttctacccttaagatgttttcaagttgttcatatacctcgcacccacgcaaagtttagtcgtcaaggaagggtcggcctcgccccggcaaagcccgaccctccctcgggggctaaaaggggggggaaccccctctgcgtcgaaattttcctcgaaaaaatatcttttctgccagaatgtctttcgtgctttttggctacttcgaaagcggaccctgaaaacgacggagtacacgtaagcagccaaggctgaccgagccgagggactcctacgcctccgggatacggatacctcactcatcaccttctgcgataagtaactcgcgttcggataagtgattccgcggaccgaacaagtcttctcgtttggaagctcttctgccggagcgattcttcgagccttcccgactgcgtcggtaacagaaccccaaggacgggtaagagtgcgcgtaagcggcaaggctgaccgagccgagggactcctacgcctctgggatacggatacctcactcatcaccttccgcgagaagcaactctcgctcgcacaaacatttctgttaccaacaaaaagtccagatactcgaagcaagaggaaaagagacgcagctttacaacacgacgagggtgtgttttggcctcggcggccgcaggaaacacacgctacaagacaatccgatcctgcaggctcgggtcttaacgctggaagggagcagcagcaccctcggcatcgacaacgccttcggcgaggtccgacttagcctcggacggcgacgcggtccgaggatctccactctgaaggatgacgtcatcgccacgcccgggccatcgctgccagggtcttctcgggaatccggcccgagcaggcggctcggccggtcaccccggggcctcggccagctgtcctccaaggacgtcagcccgaccgaggcctcggctggtcaatttcggcgtcggtcccgctaacggacgacccggccaggctccggccaaccaggttttcttttcgagccaactctgcctctgttcatgttgacaccgctacccctggcctcggctcatcggagagcggccgaggggttcctttaaccaagctagagaagcctcgggcaacaaggccgaccgagccgagggactcctacgcctccgggatacggatacctcactcgtcacctttacacggggcgactcacgcttggtgaagcggtttagacaaccaacaggtgagtcttagtgctcaaaaatgaggaaaaaacacggctccgtgccgaaaaatacatacatgttcaggccccgacagccacaatgaacaaaaacactggcattcaaagtgccattacaaacggaactccgattccacctccgcaggtacgaaaaaccccactcgacgggggggggcctgcggagcaacggaagaccgacgaacggcgcgacgtcgcccgctccggcagcggcgacgacgacgacttctgctccggggggccgaacagcggcagcgatgacctcagggcggatgccgctgccaggaggcccccgcccgtgcccaaactcgtgaggcaaggacgggcagaaggccgtagagttggaggtcggctcgtgggcggccctggctatctcgtcggcggaagaacctcttccagctaccgtggcggaagccggcgccgagagcggctccgaagccactcgggtccgagagccaggcacgctgcagctaccggcgccacggacgacaaccgtccttccccccgatcactgagggaaggagcgggccatcgcccacgtgggggctgaccccaactcggcacactcccctccccagccctggtgatgaaaatccttgaggctgagggaggggcagaggccgcagcccggctcgctttcctccaccatcaaactggaggtcaccgtcttgggtgaccgccggcggggggtgcagccgggctgcatgatgaaaatccttgaagccgaacgatggcagaaaggtaccaactcccacggagttgcgttcctccaacgatgaggcggaaagacggtggatatcccccatccgggggcttggaaggtggaaagacacgatgcataagggagcgcgaagacgtggtcgccttctaagggggtcaccctccttttaaaggcgactctccctgcttgcgtccccagccgtcgcgggctgagtcttctccaacacgctccaaggtcctccccctatggcgcgggggctgggtcccacacgtcatgcaagccgactcagagcagaagaagccaaaccgccgtgcgcggtgcgtacaaccacccagtggttacaagcgactctccgcttttgcccagacccacgggcgaaaggggcgggcagccatgcaggcggcatgcaaccgcgccaagtgggcgcacttctccgactcccaacacgcccagcatggaggcccaggcccacgcgtcatgcaaccggcgcgccgaatgcttcgtgcatgcaacagcaccgccacttgcgccactaccgcgcctcctcgactgcggaaccaataccgcgactcgaggcgacccagcgcacgacccagcagcgccagcctggcgcggcggtcaatgcggccaaaaatgggccggcagtaatggcgatggcaggcgggcaggagcagcggccacgtcgtcagccaagctcacatcccgtccgggggcagcgagagaacccactctcacggcgtgaagacaatgcgcccgtgatccattcctcgaacggctcgcgcacgtgcaacggccgccccgccaaccactcgccccgtcgcattaactccgcggcgggacaggcggcgcctctggcaggagaagcgggcgacgcttcgccttcgccataatgaccgcgtcaaaaaaggtacgccgcgtcgttcgatttcatatccttttccttttttcctctttctctctcttgcaacagggaccgagaaagggggataccccgaaaaggatccttccccgtgaaggaaccaggctccgagcctccctactgatcagaggttcgaaggctggcccctcggaagggttcgacagccgcctcagatcgcgtgggctctacacccactactggtcagaggttcgaaggccggcccctcggaagggttcaacggccgcctcaggctactcgggctccgcgcccactactgatcaggggttcgaaggctggcccccgaagggttcacagccgcctcagacgccgagcgagggatgaccatgggtacgttcgatacataaccaaggctcgggctgcgctcccgaggtaccctaggacatttccgagaccagcgggaacggtcttgtaacggaatcccatcagagggaggcatcgagccctcggaccccgtcgccaggggaccgggtccggcagatcacccgcaggtacttttgggcgtgcctctgggcccctagccgacccctaacgaacggggcacggacgtccactcggattacccgcttgcagctcaccagagacaccatgttcggcgcccatcgagggcaacatggcgctttcccccctcctccttgcggaaaggcgacgcaggggcgtatgtaaaaaagccgagtgtgtccctgatcgccctctcgccctgtgcagaggctcgggggctgctctcgcaaacccggctccggtcgaaccgttgacagcatcaacataccagcccgagaacttgggaaccgaccgtacacccgggctatagccagctcgcatgagggaacaaccagaccagccgaagcattacgcgaggcattaagacctcggaggagtgaaaccactcctccgaggcctcgggggctacacccggcgggtgcgctcgcgcgcacccaccggtacaaaacgcaaccgagaaaggctggtccccttgcaaaaaagtgcgacaaaagcctccaagcgagtgctaacactccctttgaggctcgggggctactgtcggggaccataattaggggtaccctcaaggctcctaattctcagctagtaacccccatcagcataaaactgcaaaggcctgatgggtgcgattaagtcaggaatcggtccatacgagggactcgatcacgcctcgcccgagcctggcctcggacaagggcagccgacctcggaggatctccgtctcacccgaggcccccctccagcggcgaacgtgttcccagctcgcccgaggccctgtctttgccaagaagcaaccctgaccaaatcgccgcgccgaccgaccaagccgcaggagcatttaatgcaaaggtggcctgacacctttatcctgacgcacgcctcccagccgacagagccgaagtgactgccgtcacttcgccgctccactgaccggcctgacaggaagacagcgccgcctgcgccgctccgactgcggtgccactcgacagagtgaggctgacaggcagtcaggcccggtcaaaggcaccataggaaactccgctccgcccgacccagggctcggactcgggctaagtcccggaagacggcgaactccgctccgcccgacccagggctcggactcgggctaagtcccagaagacggcgaactccgcccgacccagggctcggactcgggctaaagtcccggaagacggtgaactccgctccgcccgacccagggctcggactcgggctaaagtcccggaagacggtgaactccgctccgcccgacccagggctcggactcgggctcagccccagaagacgacgaactccacgccgcccgacccagggctcggacttgggctcagccccagaagacgacgaactccgctccgcccgacccagggctcggactcgggctaaagtcccggaagacgacgaactccgctccgcccgacccagggctcggactcgggctaaagtcccggaagacagcgaactccgctccgcccgacccagggctcggactcaggctcagccccagaagacgacgaactccgcgccgcccgacccagggcttggactttggctcagtcctagaagacgacgaactccgctccacccgaccccagggctcggactacgccccgacctcagccgacggtctccgcctcgcccgacccaggggctcggactcgacctcggccacggaagacagactcgacctcggcttcggaggagcttccacatcgcccaacctagggcgcagaccagccacgtcaacaggaggcgccatcatcaccctgccccgagctgactcgggccacagggaacaagaccggtgtcccatctggctcgctccgccagataggcaatgatggcgccccgcatactctgtgacgacggcggctctcagcccccttacggaagcaagaggacgtcagcaaggactcaaccgctccgccagctgtccctccgtcaggctccagcactcctccgacggccacgacatcacatcagcagggtgccaaaatctctccggctgccacgacagcatgtacttagggcgctagctctcctccgctagacacgtagcactctgctataccccccgttgtacacctgggtcctctccttacgcctataaaaggaaggaccagggccctcttagagagggttggccacgcggggacgaggacgagacacgcgctcgcttgaagccgctcgctccctctcccgcgtggatgcttgtaaccccctactgcaagcgcacccgacctgggcgcgggacgaacacgaaggccgcgggattcccacctctctcacgccgatctctggccgcctcgctctccccccttcgcgctcgccctcgcgctcgacccatctgggctagggcacgcggcgacgttcactcgtcggctcagggaccccccggtcttggaacgccgacaatactgatactaattatgttacatggtgtacgtatttatgcaattcggtacactatgtaaaaattttttcctgctctatgcacacaaatttaggatgacaggaatgtgatgaaaggaaattgtcacacccggttctgggggcaaaaccgaatgcatagcgtatgtgtgccaagatccatttctacacatatgttgacgtcacaagtgtaatatatcaaaagacaatacaataaaggcgtaaagagagtagagtactgtattatatcatcttaatcattgtatctttaacatgtatcaacatcaaagtaaggcggaataaaatatgggtaatctcccacaggaagatgaccggcgcatcgttagactcagtattcatcgaaatttccatcaatgtcttcttcatcaccctctaatcaaaatattagcaagggtgagctcacttatggccggggctcagcaagtggggaaaaaattaatgcaagtttaataaggtgaggctaaggttgagcagtaagcattttagttggtcaatattttattagcaacgcctgtcttactaataagtgtgtatcccaagtatcccatttaaacaaaggtataagagtatatcaaaagcacttaagtgaaaccacttaagcaaaccattggcagatcaacagatctcgatttattgtccatctttaggttcaattatcatgtgagggtccaggttgctcttgaccgtgaccacggctgacatatcagttttacactctgtagaggtggtacaactttacccacaagccatatatcccatctagtctgggttgatcggacccgtaaacactgccgaggtgaatggctagggatccattatgaggctttcacaaaatacacttaatacaaagcaacccgctaaggtttccaagtcggtatggaggccctctgggtgaggtaccttagccaagaatacgtccccttgttaacgtgagttgctgccactgtcgctccccctcttgcccataattcaggtaaggttgctaggtactaagcatataaagctaattatcaaagccagagctatgatagcactcgtggttgcactgttatcctgggtcactccatgtttcaattaatatgaaataatcttgtttaaccatcgggttaacaccataatgccaatttcatttccggaacattaatatcaaataatgagtgacatcaaaattatcaagttgagaggtagaacaaattttgcaaagcatagtattttccgagggtaatcaaggaattcagttggtaaatctaggaaatccttagttaggcaaatcccatcaaattatgcaatatatcaaaaaaataaacattattatatgcattagttgggtacaaatagaatatgcagagggaaaatccacttgccttgctcaaaagtttcctgtgggtcgtcctcgaacgtgtttggctcgtctacctcacagtccacttctagcatcgatttgcgtatcgcacatataaaagaatacatacgccaaataaataaacatacaccaacacaggggtaatcattcaccattacattcacattcatacatcacacttatcacactcataattacgttttaaagcgtaaatacttataattcattatgactattactgcgagtcattattgatgaaattatgagtaggtggctataatgctagttctaaataacattctttaagaaaataaatgctaattattttctttattactaataataaactaataaattttattccttttattactaagcagaacttatgtgtatagctaaaaatggtttattcatgactctactaacattaatattctaagaatcaataaaaatcatcaattgggctttttataacataaacatggttattttgacataaataagttagaagttaagtgctattcttatggacacctttattttggctagtaaaaatctattttcattatgactaggggtattcttttagtatttttctttctttctaaaagaaggtattattaataataatcggagataaatcatctattaacttataatatttatattgccatgaattctataccatgtactagttccatgttaagaaaagcttctattatctattaaaatgaacttatgattataaccttccaaataatttccaaaattcattgtgaacaaaattaactataaaattacctatctagtgtatttatcaccaacatgtgtctatccatttttgtcatacttctctctaatccaactttctaaaagtcatcgtaaacaaataacatgaataatcacggtgcactaatttatcgcatatatctaccaaaaatccatagcgcacatacgtatgaattccgaatcacaacatgctcatattacaacataataattacatgaattcataaactaattcaaaaagtgatttctaaaatatacaaaattatattttgggtcgtcttcaaccttgagcttgctcgtgtaaccggaaagagatcgttgggggttcggtcgagtggagaagagcatgggctcggcgtcggacggctcgggcggtctacgaagctccggcgatggtgtgggcgaactctggcgacggcggcggtggctcgaacggcgaggagagtgagagggagaagggggcaagctcaggtagggaggagcaagggctcggtgtcggttttatagaggagaagggagagaggaagagacgccagggagagagagaggcggtcggtcggtgcttcaaggccattgatggcgtcgacatcaatggaggggagagtggggaggagaaacggtcgatttgatgctccttaattcgagaggaagaacggatgcggggcacggctcgatcgcggtgcttcggccgtggtcggggcaccggggcggctcggcgacctgggtgcagggcgcgaccggggtcgggtcctggcgcggtcgggcgtcggggctgggcgcggctcgacggcatgtcggctgtgcagtcgggggaggggagggagaagaagagaaggggtcgggtggggcccgcgcgcaagagagagaaggggaggagaagaaggagggtggcggcggcggctggggagccaaggagaggtgcgacggcttgttaatgggcccctagtgggccattagggttaggttagggttttttatttcaaaatatatttttaaataaccctaaaattcataataattaaaccaaaattatttataaataaaatatttatttttggcctaataattattatattatttatttgaatttttatttaagaagaaatgctattaaatatccaaaatcaatcatgagcaatcaaaaattatttcaaatgcaaataagtaacaaacagttgaatgaaaaatttattaccataattaccattaataactaaatgcattatttttagttgatggtttttatagtgttacataaatggattggcatgcatgaaaacaaaaaaacttatttaaaatgatttatttcctccataaatgtaggatcactccaacaaccatgtagttagtctcattagaacccgtttatgatatatactgatattaattatgctacacattgtaggtatttatgcaatacggtacgctgcgtaaaaatatgacatgcgattcactggtaaacgcatctccatgttcgagtgtaaaaaccttcagttttgagtgtaaaaactcgcagttatgagcataaatactgatcaacatgaaagttgttgaaaacctcttgatgttggcataaatatgtatacaaagtgacataaaaatgtgtatgtgattgtatgtcatccctccactaggaacatgtattcaggcgtgtcccctaccatacgcacgcatgcagtcctatttttatggcagatctggaaaatacggcaatcattaggcacatgcatgtgattcctatttttatgcagatccgaaattatgacatgtcatcggagtttccattgcatgcacacaaattttgaatggcattttcgttcccactgcatacacacaaaaattggatggctgatatcgtgcaaagcataaatcattatttaaatttgcataaacacctacaacgtacatcataattaatgaaaaaactaagtatgggctcaaccaacggttgcatgcataaacaaagaattggaggaggtcgtcgtcgaaggacgccgccgaggcctccggattggaggagctggtcaccaaaggatgcccgaaccgtcgtgcataccaccgaccctcgcagcccatgccacgcgcgaccgtcatcgccaccgtagctacccgtgcttagcgaggcaaccgcctccgcttgctcgttggggtcatcgtcgctcgcccgccccataaaacaatgttcataactggtacaatgttcataacatacaacataaaacaatgttcatagcatacatacaatataaaaccaacatagtttatagcattcttcacatcatagttcacaacgtagaactcacaatcactccatagttcagaactcacagtccgcattcactacattgttcacatcattcaacacccacacaacatcatctagctataatcatcaacaaaagttgaaacaaaggtttagctttagattgctctaatgtcatgaatatctaacgagcttcccaatcttgtttcagtagttgataacaaggtgaagtactttgcctgtgaaaccacgctccataagttttttagtacacttctccatattcattggaccattgaaaatatcatatgctattttgttgtcttcttgtagaaacctagaaaattgttgaccaatgtttgatttcgtgttggaactactaggtgtgtgggacatcttatgtccgttggcggagcagttgaggtgacttcaattggagaacctaggataacgttaggctcgacataatggaacacatctagccatgtactcacattctctttaagttgtttttccttcctacactaaaaatgacaattgaaaaaggtccaaagatgaaaataagtttcatattacaatatggatgccactattaccttatgatctttgtctctctttttcatttgatcaattgagctcttaattcgtctgtagtcatggtgtttgctcatttataagtttttaaccattctagtaaagtaatatcagtagttctccatgactcatatccatcacaatgaaacttctaactacagagaccaagacatagtctcctttcgaggtccatcagttcactgcagaggattgacacaatcattggctcaagggcaggtgtgcgtgtccaatgtcagacgaccgagttcggtggtgcctgggtgcggatcggtgttgagacacacaacttgtggcagagcaagaacccaaagagacatgttctatttggcatttcgatttcacttactagacgattgaaaatgtatgggattaaaaagataaaaataatgagatatttcactaaacaatgtgtacgatagattgatctaaaatgaaagaagcatttcacttaataatatgtatgtcacattttcaaaatatttgttgttaaattaagccataaaccctaaaccctagtttattacattgattttatcttgaaactagtgtttccatggtctataatataatgtgtgtgttatggacaaatattacatagaaatccaaagacaaccccctggatgatatatcacagtaatctgaagtcattagcaaccttaccagcagcaatccttaggcgaagccggttgcttggagtcattgcgggaaggcagctgcttggtgtccatggcgaaggcgaggaaggcgactacgctacggaagatcgataagggtgcagggaaggctctaggtgaggaacggatgcgggagcacaacaacgccgcaggagagtggtggcatcgtgtctatggataaaggtgatgcaggaggttctctagcggcgtgatatctggttcgggtctgcatggatggtaggagatatatatggtgcatattagtatcaattcttatgcaaaccttgtactaaagctcagtctttaataccgatccttgtttaaaactagcactaaagactaagtttgagtaccagttctaaaagaaccggtgctaaactaatattggcacaaattctaattgcgccggtaggaaagtaaaatcacttttagtacaggttgtatataataacccgtgtactaaaagcctctcaggtttatgaaccggtattaaaggtttttaatcggctcgtggattgaaccagtacctcatattagcactggttgggaacaaaagccagtactaatttcttttgtatcgatctccacatttaaaacaggcacggaagctggtgtcaataccggttttaaataactgaaataaaagttgttagaccaaaaccctattctccggtattctcatttgcgtctcgcgcgcattttttacattacattattattacaggactatacagattggtggatcaattttttatcctccgtacgtccatgtgcaagacagactgtaatataacttgaataatgtacatgatgctcctataaatagccaggagctaagcctagctaggagggttcgttgtcgccgtcgaccagcaaaagctagctagctagagaggcgaagtaactttgaagcaagcagtaaattaacccaccttattatcagttctttaccgattaattcttcagctagtttcatccctagcttaattaatttttccccttcgagctagcaatggccatccaaaagccatacaatacaacaacatgagcacggtggctctaacggtactagtcctacttgtagcctgcagtcaagtcatatcagctcattccctagtactgcagcggtcgtcgtcagctaccacgaaagcagcagccgcagggatgatggagggcacgatcattccttaatggggtgttggtttgagaaatgaggtagtccatatcttctcacttctcacttttttgtttggtttgtggaatagagtgagttaatccatcaccaccttattcatcatagttagttgtttagtactaatatgtgtaatggagtcatctcaccaaatttgagaaatggactcatgatgcaccacttcattttggatagagtgattcatcaaaccaaacacctcataatttcgtctgcttgttaccctaggtatatgtatgattagatatatgcatgagtttggcatcattctcgatctctgtcctcttcgctttagggggtgtttggttacaccccgctaaaatttagcccctgtcccatcgaatgtttgaacctccgttccgggtattaaatgcacatctacaccagcagcaccttctccagcccaggcaccatcttccccagtccaggcgccaccccttccacctgggccagtgactcgggcccgtgcaagagaattgaactacatcatgctgttaaagaacgaaggcccggaagaatagacgaccagcccaactgcggcccataatgcacgacctagggttggccgcccctaggggctgcgccccctctctatttatccaggagctgcgcctcctttatttctagagttttgttttacgttagctttagctactctcgaacacgcgcaaatctgcgctgtcttcgtgtattcagaactccaccctcgagtaatagattagattgctcgcatctttttcttgttcgttcttcgattgcgcacaggaaatgatcttcgtgatcaggccgatctcgcatcagcaaggtcggtaaccacaggaagttggttcagcgattgcattggcgcctcgggcttgctcgtcgtagtcggatcgcaagggtcatcttccgccaaatcggaattatctctactcgccgaaagatcgggcacctcagctacatcaattggtatcagatttccaggttgatcggtgagtttatcgagtgttttttttcctacagtccacaaaaccacataaaaattcaggttagaccttatcccagcacccttttgagcctcgcactttctttcaataatctgcattgttgaatttgtgtgctttcgcgtcatttgttgctggttgcattgtgttcttccaccattcaaaccctagcgccgccaccatctcccctttgatcacgccacaaaccgagtcaacattgtttccttgtttttctccttcggttacgtcaaaaaaaacagaaaaaacaaaccgagtcaacggccgtttccttgtttttctccttcggttacgaaaaaaaaacagaaaaaaaaacaaactgagtcaacatcgtttccttgtttttctccttcggttacgtcaaaaaaaacagaacaaaaaacaacgaaggagaaaggatatagttgtttcatcccggtcgtttgaaaacataacttgaggtaccttccttaaaccgggcataacttttcgctcgggtgtccaaaaaatctgaaatttttacaggagctagttgacaccattctgaggccggccaaactcacctttggtctgtttgggttcgtcaaaattgtcaaaaaaaattcaggaaaataaagaaaaaaatccgtcaaagttctcgcacgcttttcagagaacttcctgattttctgtagaccacatctgatctctgttttaggtgaaacttcgtctagctcctattttgttgcttcttgtgctgagaaaaatatcaaaaaatcatacaaaaaagaaaaacaaaatcacttgtgattcctactagtggcctcgctagtacaatatttacggtactgccattctgctagttccatccgtcctttgcacttgtggccagcaatatagtttcgtgttctgcactataattcaactttgcattattgtttgattgtgctaatcattgacttgagtgcagcctacccagaactccacatatttctacgacgagcaggcttctgtttctccaggcaatcgctcatccaatctttcaccggttccacctgttggttgcagttcaccactgtggcttggtaagaacggataagaatttgacaacagcactagtgtgagcgccttgtgagcagtacacccctgtttttgtcgttgttttttttcttcttcttttggtgttttggtgtttgcgctaactatggcaggagcacacgacacggtggatgcccagttgctggaagtaaggggacaagttgatggacttgctgatgacattaggacgatgcatgaacggcttgattcaacggtcacttcgacgaccgagcgtttcaaccagcttgaccttgctcaaacggcgactcgcaccacactcgacaccatcctggcacgccttgatgcgttgaccacaaagatggagcaggactacggcggtgacactgagtgggaagatcatccccctaatgacttattttctaagattaaatttaaaattccaccttttaatggcaaatatgatcctgctgcatatcttgattgggagttagaggttgaacaaaaattttcatgccatgatattgctgcacattctcaggttaaagctgctattagtgaatttactgattttgcattaatttggtggcgtgagtttaaaataaaacatcccactaccattccaaccacttgggatcagttgaaagctgcgatgcgacatcgatttgtgccttcgtattatgctcgtgatttgcttaataaaatgcagcgttttcagcaaggttctcaatctgttgaggactatttccaggagttacaaaaaggtatgattcgttgtggcatattagaggacaacgacgctgctatggcacgttttcgtggtggtttaaaccgcgaaatccaagatatacttgattataaggaatattatgatatgactactttatttgaatatgcttgcaaagctgaacgtgaagtgcagggacgccgctcgaagccatattctaacccttttgcaggacgaagctcgacatccacctcagcaccagttccccctgcgccatccacgtccaccactactccacgcgagaagacgaccaaaccagccagcactgccccacccacaggtcgtacacgggatattcagtgtcatcgctgtagaggatttggccatgtgattcgggactgcccaaacaagcgcactttgctcattcgtgacgatggtgagtactcttccgctagtgattctgaagaaattgaacatgcactacttgccactgaccatgcagctaaggtggaggtacatgtcaacccgggcgacgctgataggtatgaaagtcttgttgtgcagcgtgttctcagtacacaggtcgctttgcccgagaagaatcagcgacacactctgttccatacaaagggtgttgtgcaggagcggtcaattcgcatcattatcgacagcggcagttgcaacaatttggcgagtaccatgctggtcgaaaagttatcgttacccactcgtaagcatccaaacccatatcacattcaatggcttaatgatggtggtaaaataaaaatcacacgttccgtgcgcgttcctttctccatgggtgcttattctgattttgttgattgtgatgttattcccatggaagcatgctctttgttacttggtcgaccttggcaatatgatactgatagcttgcatcatggtcgttcgaatcattattctttcatttttaagggtcagaaaataattatacatccaatgacacctgaacaaattgttaaagatgatcttgcccgagctgctataactgctaaacaacttgatccatcgccctctgttccttctgaaatcaagttgaaggctcctgttttacttgctatgctacacgtgctgattttgatgatctacacggtgctcatttgccatgctatgcacttatatgctctagtgtcctcatttcacttgatgatgcaccatctttggctattccccctatggttgctaaccttttgcaggagtacactgatgtctttcccaaagacttaccaccgggtctcccaccacttcgtggcattgagcaccagatcgacctcattcccggcgcacagcttccgaaccgcgcaccgtaccgtacaaatccggatgagacgaaggagattcagcgccaggtacaggcgttgcttgacaagggatacattcgtgagtctcttagcccttgctctgttcctgtgttacttgttcccaagaaagatgggtcatggcgtatgtgtgtagactgtcgtgctattaataacatcactattcgttatcgatatcctataccacgccttgatgatatgctagatgagcttagtggtgccattattttcactaagattgatttgcgtagtggttaccaccagattagaatgaaactgggtgatgaatggaaaacggcttttaaaacgaaatttggtttatatgaatggttggttatgccgtttggattgactaatgctcccagcacttttatgcgagtgatgaatgaagttctaaggcccttcataggattgtttgtggttgtttattttgatgatattcttatttacagcaaatctaagaaagagcatttggaacatttaagtgttgtttttgatgcattgcgtgctgcccagttatttgctaacatggaaaaatgcatcttttgtacacgacgtgtctcgtttcttggttatgttgttactccacagggcattgaggtggatagcagcaagattgctgccattcgggagtggcctacaccgacgacggtcacacaaattcggagctttcttggacttgccggtttctaccgcagatttgttcgtgattttagctccattgcagcgcctctacatgagcttacaaagaaagatgtgtcatttgcttggagtgattcctaggaggaagcgttcagcactttgaaagataagttaacccaagctcccctattgcaattgcctgattttaataaggtgtttgagcttgaatgcgatgctagcggtattgggctaggtgctgttttgttacaagaaggaaaaccagttgcttattttagtgaaaaattaagcggtgctagtctgaaatattctacttatgataaggagtcggattataaaactaatttgtcagccgaagattaaaagacgagacgaatctagtccagttggttgggtctatatttcatacttctatttaaaagtcaaacgcttgatgtgacccgggctaaactttagcaggagcaaccaaacacccccttaatttgctaattccgcatacacctagacgggactagcttgcatttgtttgccatatatatattatttgtttttttttctagtccgatgattgcatatactaattcttaaagaaagtacagagttgaatgcctgcgcccaatatgaagggatccctatatgaattagtaagcagagatagagggaaagcagctttctttcctttaaaaaaacgaactaattaaggatccactagataatagcaacagtccaaggctccaacaagtagaaaactgaatactgactgaatgcgaggcacatgcgtgcgtactgcgaggtgttgtcgccatatcgagcgtgtattcctcctccctttgtcttgggaactagctctccctacaaaagtacgtgatagctaggtacattccttttagggggtgtttggttaccccaaactaaactttagcccctatcacatcgaatgtttgaacctccgttccgggtattaaatatagtcggattataaaactaatttgtcagccgaagattaaaagacgagacgaatctagtccagttggttgggtctatattgcatactcctatttgaaagtcaaacgcttgatgtgacccgtgctaaactttagcaggggcaaccaaacaccccctatattaggtaaagatgtttcctgctgggtgtaccctcgcgtataatgttgtattgcatttccacttacggttgtgtcttgtgaacgaactgaaacctatcgtcgatgtttccagctgtacaaggcgaagagctaccctctctatgttttgtccaaatcatgtaatccttcacaaatcctcgacataccagatgagatattatttgttctctatcatcaaatacaacaacctttttgcagtccatacatggacaatatatatactttgtctttgttctctaagcatagttcgtagcgacattaataaacctatgaacctcggatatgtatgatcgatctagccttgataagttatacatctagggtgccctcgccatcatcacctgtaaaaaagtaacataaacacacaaggaacacaaattgcactagtacagagaagttctatagtggcggttgtaaaccaatttatagtggcgtttttcgtaaccgccagtgctaggggccagtagaaatcatcatttttacaggcgggtaactgaggaccgccagtgaaaatcgattttcactggcggtcggcgtaataaaaccgccagtgaaaatcgattttcactggcggtcgacgtaataaaaccgccagtgcaaatcgtttccaggaaacataaaacatattttaaaaatagttaaaaaatttatttttattaggggggcctcagcccaccccacccgcccgtctccgtcgaagtcgcaagtcgcggcatttttcgcgcaaaattcgcgcgctacgcggttgttagtattcgaaccgtcgacctcaccctcgcgcgtaccctagtttatcttgtgtctagtttgtagttgttttctccacatattacaaccatttgagtgtaaattgcttatttgagaccctaaacgaattcaaataaaaaagttgtcaactacaaagataaataacttttgaagttctacaacttttattttgacacttttttcatctgaggtagtttgcaaaatttgaattttaaatttgacatacttagattcaatttttgagaaccgaaatgagttcaaataaaaaagttgtcaactacaaagtttcataacttttagagatcaacaacttttattttggtggttttgtcatacgaggccgtttgaaaaactcgaaaaattaaggataaaaatgatttctagtggcggttccttaaaaaaaaaaccacaaaaaaaaaaaaattttttctgggtgtttttttaaaaaccccccaaaaaaaatattttttttgggggggttttttttaaggaaccgccactagaaataacacagtcggtggataaccgaatccgcctgtaaaaatatattgtccccgcaggctttgagcctttttgtactagtgttggcaagagaaatatgagcttaaaagtttgccaaaaactacaactgcttaggcgaagggtttttgactttctcacggtctctttctatagaagcgttttcaatacccaccacagctttttcaaaagacatagcttaaccaaacataatctacttatagatcatgcatgcatgcgtgtgtttggtacggctccatgttaccaataaagtcattttgttcttaagcttcgttcatgaaaactcaatcgatatagataaagttgtttatcataatatagtttctcataataagaagaaataaataatataaccgtaatgccgttcgtttttttctctccattcaattctttcacagggcaagggcatgggcagcaccgtgcatccatgttactcaagtactacaagtcgccagtttgcttactttttaggtccctttttaatttcctattcgaccgatctgtgtgataaacaatttaccggttaattttaccactttggccctcaaacaaactggctaataaattgactaattgttagtcgggggctagcaaactgtttgcccattagtcaattgaccttgttaatatataggtgctaatagaacgtataaagagaaaagacatatatattagcaaagactccaaacataccctggctaattgttgctagcaaactatttaccgggtaattgttagccactggcaaataattagccgcgaggatcaaacatggtcttagtcgtcgttattattcctttaattaattttactagaggcacacacacaaatgtgagggtcatatcctaatttaattaccattaacttcttatccatcttatacaacctaccaccctgccttaggttatcaaccgtagctttgcacctgtttaaattacatatgagtggaacatcctcagtccacatcatgtcagaaacccttatataaaaaagtttggaaatagtagataacacaaccatgaagggacgcctaaacgcaagatcatcatcaagctattttgctgcaatcttttttaatgtgaataataagtgtcttgggcttacaaaacccatagaacctctttgatagcgccttaatttctatgatcagcttcttccttcttatcaacatgtggaggaccaaccccaacattgggtaaaccaaagacacaataaaaaagaggaatggtccatttgtacacaaggttgacatttctctttgatatcctaatttaaagtcattctaataagattttgtcgcgcgacactgtcgctcgttctaaagtgtacataaatttgacactagattgaattgtttatgttgaggtgtttttggtgtcccttggggtctgtattgagttttgagagtcaagccatgtgtgttctaggttgagaattttttgtgcctcacattcgtcggatccttcggtcacaaataaatgatgtcactaaataccttgatctctagctttactttgatttgagaaattacttagcagtgttcttttctctagttaactattaaagcatgtccatcgtggattcttataaaaaagagtcatatatctatatgttattatcatgcataaatatataactgatgagtgatgcatggcaactttgtcggcaattaatgtagctgttaacagcattaaggtggtgggtctccgggaatacttttgagttcggggtatactagccaaaagatacaaaattaaccggtaacatacacataaatactaaggacaagcaccgtgttaacgctaacgacaaacacaaatggaggatcaaggctaggattccatatgtcgtactataactgataaatggcagcgagctgtcgtccaacaactctggtcaggctggaacgttccggtgaccttgttcggttagttctcaatccatatgaattgagtgagattaggtggatttaaatcgaaagcaagttaaatctcttcttaattttttccaatctcattcaatccatgtgtaatgtgaataatcgaacaaagccatagtaaaattcattatgtattttcaacatatatactaattaaagttcatccttagggacatatatgatctcatgcatgttcccacatctctagctagctaggtttatatgtcctacatgcacataattaagatgtagtccgtaatttttaacatacgtgttagaaagctagtgcacgagtatatatggcatctggtccttcacctcctcggctcctccatgcatgtccttgtatatagcttgcaaaagagaggagtttagtgttgctatctgattaatccatgtaatcaaatatgacactttgtgcccaccatgcacatgtgccagcaggctaaggtagttatctctactactccttatgtttgtatcgtaggcgtgcacagtccagccggttttgccgtcgcgctccctccgcctccctccgcgctccttccgccctccgcgctagatccctgattcccgtggcttcgccatcatcgccgctcacgcaccttccttcgacaaccttcctttcatgatgcctgttgctccttccaaccttggcacatccttccatctacggcacccactgtgcctccgccctgccgcgcgtgccccgcctcgtagcccccgccggggacctctgcttgggccgcgccaagccaggtgattggctcgtggacctcgaagccgtcgctgcgggagctagcattctacggctgtgggagctagcgtcccgaccgaggtcgtcgccatcagtcaatggccatgcctcgcctccgtgatccccgcatcgcacgccccccgcaccgtcgcaggtttgttactgccgcatccccctcacccccacccaccgccgatttcgtagacctccatgcacgccgcggatttcgccttcctgaagcaccctaagatgtttgcgctgccgccccaaccccacttaccaccccaccgggcacgccatgacagggaggtctgtgcccgctgcccacaccctccgccccaattcacaaaaccctagcgacctcgatttctcaccggcatggtcatcaacacctatctctcagccaccacagccggtggtggctgatgcagttccagtgcgcgctcatggctgcaccgcccatgtcgatccccatcaagaagttgtcctggaagaagagcacccgcatccgctggcctccaccgacgccaccacctcgcctgtgaaccagttctcgttgaggtacacgacagccctgtcactagctgtcttgctcctagatcttagtttattgtggtcgtttatccctagagtttaagaatatgtggatccctgcaaaataattctcgtttgtaatggtttgatctgtagtttctttgtcgtttaagttccacttctttcactgcaagaagatcgcctgttgcttttttggagtagcactgagactgaaattgtcaccctcagttgacttgatccaaaaaatgtgccaaaatgtttcataaaactaggaaagtacttctcatccttatttctataaggtttatgcatgtgactttttcccttgtttcaggtcctagccaaagagcaagttgatgcactatcgaaggaattgtttgcgctttcaaccgtcacaggtattttgagcacactgctggctacttgtgttattgttttgaccaataaaatctataatttatctgaacaaattgatgcaattgtctccctgttctaaaattcaatggtagtcacagatcttagagagctctatatgtttctgttagtatgattgtgttaagtttatatgttctatcttgccactttgctctctagcagatgataattaatatggttgcagttgctgctcatgtctaaagacaatagatgctatcccagtagatgcacatcctatgacacagtttaccacattttcaaaccacattttcaatctgctctctatcttctgaaccggtaactgccttcttcaatatcgaccaccggccggtccacctcttcaataatcgtccttcatcccccttcagttgtgagttgtgacatactatttgtattcgaatctgatctattacaagtatacatggatattatagggtgtgcatctgtatacccatgttccttacaaggtccgtccctaggtgatatgagtagtaagtctaaacttgcttcttaccaagagttaggatgtatgtgtgtatgtattttttagtacaatagtattcaaaatttatgaggaccctttctttttgattgttttgaacaatgggcatatgaaccggtggaagaacaattcgtgcctgcagtgttatctgccacctatctttattatgcttatagagtgggagataacatcccatatgacattgtacctaatcctcagctatttgatagttgtttgtgttttaaggctgcatgggtgtattacagttttggcggtatccattgtttgaacgatgggagtatagaggacttctctgcataaataggtaggtttcccactaatttagtaattttgtctgccacatataaattgcaggatagcagttgacgtgcctttgcagctcatattcactcctatgtgtttgttgtctgggttccttaggtgtttctaggtagggatgcaagttggctagccctcaaacccgcatcgccatcctaattgctctgtcttgaatgtggttaaatggggctactgggatgggattttggtgctcggtgctgctggagctaagcttattgtccaaatccagaattataggaagatgaaactttgttgtcaatttcaaatttattttttctatggatgtgtctgtctggaattacctaactttgcaacctgcaatcgataggtatcgacaatgagacggatcgtcgggaccagcgaagccccgcgacgacgtagcaaccagagccctcccgcgagacgattcccaaagttaggtgtgtgacttattccattatttgtaccacatgattgtcagacatattaacagcacaagattgacaagaacactcatgtattttccagtaaatcatcttgattaccttggtgtacaagttgcatgggtcactggtccatggttcctatctattttagtatttttatgaacatgcttccctgggaaagtggtgagccttattctgtattatttgaaacatctacattttcctttttgaaatgatgtttctctgcttgacttattttgtgttatttgaaacatttaccttttccttttcgaaatgatgttcctctgcttttgcaatataagataagtttattgagaaatgtatttcaaacagtagggccttttaagagaccatggttgcttttgcaatactgtaaagtgacacttaccctgagtagttgtagtgtaaggtctattgtcattaactattttttatagctaatgtttacttggtctttgtgcaagtatgcttggactaatattctgtttcttgagtagactataagctattatcttctctagaaacaagataagtcattatactgtaaagtgtaaggtctattctgtttgttgagtctggttgtatcattgcggtcataagttattttggagataactttggttgcagatgatccgttcagcatgtcctccctatttggagtcccttggcacacttattttttcctaaaattctcaggagtccttatctattgggaattatggatggagggagtagtatcttgggttgatgagaatactatggttgttcctgttccataaattttgttgcattgtggtgagagtttgagaatgttcttctatgtttgttctcttaaactagatgttaacatatattaactatttggttttaggagtagttgttggagtaaaaagatgttgggtcctaatccctagaaatcagttcctaattttttaggccccaattatagaagtccctcttggaaatgctctaaggagaagggttttgaggcaatgatttatattatctcccttgatgtttttaattattctgtggccttgacagttaagaaaaataatcaatactcaatgaagatggacgacgtgagtataatggtgacgacaaaattgcaataacagttattggaatcgtaccctgactcgagcaaaattgaatccaaaatcatcacaatgatactaaatggggttgtacgagggaattaaacgaacaccacacatcaaactatggaatcttcagatttaaggtaccagctgaaatcacaacattgcatatagtgacatgaattcaaaacatagctaaggcagtgtccaattcttggtaaactagatgtaaaatctactggttgatatcagccttcttctgccacagcctgtccaaggagctgtctgcgtcgccctgtgcacaacaaaatatggaatcagaatctaccactatacaacggacaaccaaacatagcaaaccaggtaactgggcaatccactagactaacatataaaccaggacaataaaaaaattgttggctagctgtctaggtgcaatgtcacaatggatttagatgcgtctgaagtctgaacacatacatgtaataaaatttgattcctggtaaaactattaccaactcttaatttgaacaaatatatatatatatatatatatatatatatatatatatatatatatatatatataaacacagcctaaatcctaggctaggaattaaccaatgtgaagccatataaatccaacaggcatcgatggaaggtgcatcccgcagtccccacctccgcacatcaggcccaacccgcatccttgacgaaaactttcattcacctcccatggatgcgccaacctaccatcgacgtcgaggatgccggggctttaagatgtccaaacagatgctccaccccattccaaatcctccccagacagcaactgcaacttcgacctgattctggtacatcttctctactactcatacctgagtatgtacctgttactactcatacatgttagtatctactactcagtcagttcgtgcacacatccataatttcaatcgcagccgggtactttcctacttacaatacaattattatgtttgggtaatcagttttattctttaattttgattttgattttggctagatgttttggtaaccagacatagcatagcttcagtgacttaatttcttcccctctaaaacacatggctatgatattcggatatttttattactattgcacccaagtaatactaagtttctcttataagatatatactgatgcaagtcagtaagtcacaagtaatcacatgggatttttattgtctttttttatagaacttgcatgaaagctattaatatgcttatcctatatttttaacagaaaaatgaagtcagcaaggaatacttcttaaaaactgtaaggaatattgttggtgataaattgcttaagcaagctacttcacaatatcaaatgcaggtaaataatatttccacttcattgtgttatatgtaaacataacctgtcttgccaccatagctttgtatttttggtgtgatgcaatcttattagtcattcttaccagcactttttgttttgttttgtgggttatttactcatgtttgctcaggcacaacaaagccctcagacaaacccaagcaactattctttatcaggtcaagtttctggtcagcagactgctcccagtggttctgtgacaggagatgaacagaagggatatccaggggcgcacaccatccctatgagacaagctattgccagcactcgaccacctcaatttcggccttccttgtctggccaaatgcggagtaatacgggttatccaccttcacaaaccaatttgcattaggctaatgaaatgggaaacatgtcagatgggaaaggggtccatatgttacaaactcgtccacccaataactccataccagtacaaacaatgcagcatcacgtgcagcgaccacaaacatcttcaccagtgtttggggcaaatagtattcatgcacgtccatttccgcggccagttggagatccagctgcaccatttagaccacaaatggcagattccaatccaagagcacacttgattcagggagctgtgaccacagtatctgggagtgtgccaacacgatccatagtgtctggaaatgcgccaggtaatcaatctacaaggcaacaatcagcaaacaaggagcaaaaaactatttcttttgctccaacaacacatatgaataatgataggttgataggtatgaatacttgatatggccttttaatatactaagggaatggtattctattattagttagctggttatagaaaacacaatttaggcgaaggggtaatctgttttcttgtgtccatgtgcaaactgctttgctctttagttcttacccatgagcttttatgcacatctttagtagtgcctaagatcttttcagacttcttataggttttgatttgatgtgcatggcaacttgcttggttcctactcctaccttataaatatttggcaatgggcattgctcagtatactttgataactgacaaatggctataaatatagtttgatcccataagctgcctttctgttttttccagctccaataaaatcttcaacatttcttttatagccttagtcaagttcaactgtttaagtagtctccatcaaatattgttctatccgaaagagatgagaagtactttaagacaaatgttatggttgaatagaatgattgaactgtagtaatgttcaaaatttagattacaataatagaatgtcattttgaaatttttatccacttgttgagttccctttcaattaactggggatgagggatatatgctctgtgtagtttattatttttcgtgtatgaccaaagcaatagcaaacctaaatggtccaattgatgttctattttttggtgcatgcacactactgtataactttagtattactttcgtgatctctgctgacagatgacatgctccttttgtagtgtctttgaagcctgaactttttgaaggattgaggtttgacttcacaaaagggttgaatcaaaagttttttcttagccacaggtaagatcattacataagggtagacctagggccagaggctcccacatgagtgtggcctggggaagggataaactgaaccaagtctccccccgcaattgcagagaggctgcttcgaacccgtgacctggtgattcagtgagacagctctcaccactgcaccaggcctgtccactaagatcattacataacttatgctatattttcccgagtatgtcctaacatcttccacagtgtttttatgggctccttagaagttccagcccaggggcctgaaactattaaagttccaactgctcattatgaatttggtgccaattttttagatccaaaggtttgtttccatgtcacccattgttattgtggcatcttccataatgatttattccttaactcatctgcttctgtgcatgaaactatgtgtagttaatgctcattggaagggtgataacagatggaaggcttaatgctcgcgtgaaatgtgatttgacagacaatctcacgctgaaagtaaatgcacaggtagatggatcaaagagtttaggttcagtggttcatcctttccttcgttgatactttgctttccttattctactgatggttgttctcttcctagcttacccaagaggcacattactcacaaggaatgtttaactttgactacaaggttgacgtttctgacaagtcagtcaattgtagttttccaaactttcatgattagtttttttgaacgtaaatgattattttttattagcatctgtaataggcaaacttttactttgcttctaggagtagtttttatcatacatttattagttccttgaatcaacacttcacttatttgtacaaggaagtgactatcgagcacaattccaaatagggaacaatgcattctatggtgcaaattatattcaggtaaaaactctagcaatgcactttactttctaagtttcaacttacatcttgatgtttatgcgttgctgtagaaagatgggggaaatgactcatttggtagtttaatgccatgtaaaattcagtagacttggttatgtcctctattgtctattcatatttgtgcttcttgatatctgtttgagttgcatatatctttgccctcaagtgtttactgtttgattgcataactgccattaattaattatcttactactctataaggacgtaacgagggcgtccacaccgcggctccgccggacatcgcaacaatctccccgccccagctctcctctccctgcgccgaggccacaatccctgccgccccggctctcctcgtccccaaatcttgcacgcggtcgtaatccccgccgcctcgctctcctcgcccctagatcgccgcctccactatcgctgatataccagaccaagcaggtagagcagaccaagatgtcgctcgaggaggccaagctggagatggccacgctgctgcagcagcaggcgagcaagtcatgcatggtactaagtcctgcatggtactaatggttgtaatgtagtgatgaaatagctagattaaaataacaaaatttatgtatggctaggatcacaaatagattacgaaatcttttatcgtaacagtataacacacatttgtagataagttatcgcggtattatatgtttccgttgcaacgcacgggcactcacctagtagttatatatatggagtatattgcagctctagtcggcacacgcagcttcagtgtacctagtacgatgctataaatagcaacaaaatgagctcacacacatcagcccagcccagccacaccagagttcacccaccctcattccgccgccggccgctaggtatcaccggcgccattgtaggccggccctgcttcctctagctaggtagctaagctttgtaccatggtcttctgtaaggctagcaaagcagccttcatcctggtgctcgtaatcctcgtctcctctaaccatatcatgatgtactctcgaggcaaacaacccctccgggtgatgcataggaggtttaacctgttgtcacatcattccgctggggacaccatggggacagcaatgacgacccgaggcggcacagtctcgccggacgacggcaccgggagcggcggcgtcctcggagaggacacccgagcgacggatcctggacacagccctggtgcgggccatgcagccaccaacagtggggttgggaggaagttgcttggtgttgttggtgtgtaacctagctagctagaaacttgtctatcttcgtttttcttgttccttccactgccggaatccgggcctttgccgagtgctttttatcgggcactcggcaaagaagactttgccgaacgccgcactcggcaaagtcctgcgctcggtaaagagcttatttaccgagtgcacgacactcggcacagccaagcactcggcaaagactgctttgccgagcgtccaacactcgacaaagatggctctcggcaaagggccgttagcggccgtctacagctgacggccgtcagtctttgccgagcgtcaaatatctagcactcggcaaaaaaagtcgaagacactcggcaaagcatatttttatttttttaattttggttaccaaactttttgtggtatgttcctacactatgtagacctatatgtaccattttgggacaattataacagtgttttctatagctagtagatttagtttgtttatttgaatttcttcggaaaattcagatttgaactgtaggtcactcgaaacttggaaaaccgtgcatgcaaaaatgatatccatgctacttagcacaagttacgaccgatttcaggagcgggccggaaacttcgagcaccatgctcactcaacatgaccgtgaacttgccatccaggtgtttaaaaattgtataaaacacaaacagagtcagaaaatcatgaaacttgtccacgtgtcatgatatcatatgtagaggctgtgataaaaatttgaaaaagtttcgaaaaagctgtaacgcactatgtgtacaaacctaagagatccacattgaaactctatgatttcatgtgtagttctctcaggtttttacacataatgtctcacaaatttctccaaacattctaatttttttatcacagactctacatatgatatcatgacaagtggacaagtttcatgattttctaagtttgtttgtgttttataaaattttgaaacagctgtatggcaagttcacggccatgttgagtgagcatggtgctcgaagtttccggtccgctcctgaaatcggtcgtaacttgtgctaactagcatggatatcatttttgcatgcacgatattccaagtttcgagtgacctgcagttcaaatgtgtttttttcgaagaaattcaaataaacgaactaaatctactagctatagaaaacaattttctaatcgtctcaaaatggtacatgtaggtctatatagtgtaggaacataccacaaaaattttggttgggaaaattaaaaaaataaaaatgtactttgccgagtgtcaagaaataacactcggcaaagaagcctttgccgagtgccagctggttgacactcggcaaagaattgtaaaagtatatttgtcgagtgccgcccagtgggcactcggcaaaggcttctttgccgagtgtcagcgatctggcactcggcaaagaatattttaaaatttaaaaaaatctttgccgagtgccagatcgcgggcactcggcaaagtcaggaaataaactaccggtcgttcttctttctcctttctcttctctcacgctctcttctttctcttttttccctgccgccgcgtcgtctgcccctccccacgccggcacgccccccccccactcaggcgcccgcccgcctgctcgccgcggcggccactcgccgcgccgggccccctccccacggtcgtgcccgccacgcccgccgcacccgcctcgccgcaccgtcgtgagctgtgtcctcgccgcaccgtcgcgagcaccgtcattagcatttttgttaggtatgttagttttgttgctataattagttgtttgttagttttgttagcatttttgttaggtatgaatatcgtgaatatgaatgtgataaatgcgaatttgatcggatgtgatgaatgtgagttgaatatgcaggttttagtatcctccccgtgtaagggaggtgctgtcaaaaatttatacttagttatttagtagttagtgggtagtattaggtggttagtatttagtcggttgtggttatacttatagttatctatctagttattagtgggttgtggttaagcaataaccatccatagtggacattgaatatttaattcgtgtttcaaatacttgtgttaacatacttgtgattcttttttacagagaagatacttgtcttcctagccgctgcgggtctgcctgcaccgcgtcgcgtcgccactgcaccgacccgccacagccccactagcctgactccaccgccaccctaggtataacctctatttccgcatcatggtcgtagatcacgtaacccagttaggtgtctcccattcgaaagagatacggtgtagatatgcagatctttgcatatctacaaatgtatcagtttcgaattgtccacgttttttggacaacccgcgatttgagatagacttaaccgaagcgatcgaaatggaagtagatattgaaatggttgttgatgaggaggaggatgaggtgcaaaatgagaatgacttagaaatgcttgaaggcaatgccaatgacgaaattgcgccttcagatggtgttgactatgaaatggttgatagtgatgatgacacttatgatccggctaacccggacacatatgaagattatttttaatcgatgtaatgctatatttcatttattttgcatatgtttctaaatacatattacatgtgcttaattgcttactcttaattgcaggttgttggacaaagatggtgggcggtgggacgaggacgaggagggggagggggaggaggagcacccgtaggacggaggaggaggcacagcaggacgacgtcgtacagcagcaggtggagcagcaagtcgctgtcgatgcgacgcagcaggacgacgacgatgcagcgcagcaggacgacgacgatgatgccgctcagcaggacgtctcaggttttggctcctcaggttcgaggagcatctacctgcgaggtcccacgagtctccctcagcgacccatacttcgtgacagacgtccgctgatacgacccgatggagagaggtaggtaactttagatgttgttgctgctttttcatattatatgttcaaattaataatagaaactaatactttatcttaatcacttggaaaggtcttggaaggttttggagagtgcagggggtcacggccgcaaccccaatggcatcctcggccttctatgcagggaacacttccctggacttgtcgagtacgccggagtgatgagcccagcctacaccttcgaccactatgccgtcgcccccgatgcaatagatcgggacggcagagaattcaacaacaaggtggagcgggtgaagcaagagttgtggataagtcttcctcgcactatattgtttaataagtcgcatttgttgcatattcttgaaataatgtatggatacatcgtctttgtatgtaggatatcttcagatgcgaggctggatacgaggccagggcggatgtggtggctaccacgagctgtaagaagctcatcatggacatgcactacgaggcgcgcatccaggccatcgtcacttaccacggctccgtccttggggagaaggtgagcaagaaggacgcccgaaccatgtcgttgactccggaccagtacttgcaggtaaatacaaaactttattattggtactaaatatgcttaattttatcttctgatatgtcgtgtacttgtatttttttagatgattcctcattggtgcgccgcgcatcctgagtgctgtgagcagatggtgcagaggtggtgctcggctgagtgggacgaggcgcacaacgctagccgggaacggcgtttgatgatgcaaggtccctcccaccatcaaggcagccgcagcctaggcaaatacgcggaagcatgggtacgcgctcttttttatttaggtatataactttcgattagacatgatttctaaccatctcgttggttatctcgcagtcggtggcacatggtggcgcgccttgctccacgttctcggcatatgctatggcccacaaggggaaggcgacgtccgacgtcacctacaacccggatgacaggcccgaggcgtacaccaacctcgccgtccacagccgcctcagtgagtacaccgccatggccaaggaggtccacgggccagattacgatccgaggaccgaggacatcgacggagatgtcctcatgagggtcggaggaggcaagaggcatgggcggtactggattgccgacagggcaatcgactcgtcctccactcccactctatctcaggtgcgagctaggagcacgagcgcgagcccagccatacgacctcggcaggacagctcacagcatcgtatccagcaactccaggttattccttatctattcatcgttcattgattattatatatcttctctttgcattatcgtaacattagggcgaaatataacatactcagctagatgatgagaggaggcaacgtgaggagctggagaagaggatggcggagatgttcgcgtacatgtagagccttgacgccgcacagggtcatgctccaccaccttcgttgttccctgcagctgaccctgctgagttcactactcgtgtgagtatcaaaattttagtactgcatgatatatattcatatgttctcacacgtgcaatctcttccctgtgcagggtcaatcggcggtgtcgaacaaccctcacgcttcgtccagcccttcgccgaaccagtccagatgcccacctcgttgatgacctgttttgtgatgatccagacttatatttgtgagtgttggtgatgttagttatacttggtcttgtgagatacttattgagacttatgtgctgtgaaacctaatttatgtggtgatatttgtgatatatatggtgttgatgataaatgtgttgattctgtgatgcgaatgatatataatgtgatgtgaatgatatatatcttttgtttgtttggacggaacagcaaaaacaaataaaaaagggacttcctggtcactttgccgagtgtaacactcggcaaagggtatctttgccgagtgttataaccttggcactcggcaaagaaggaaacctgggaaccggtaaagccttctttgccgagtgttgtggtcaagacactcggcaaagaagccacctttgccgagtgtcgcccagcgcactcggcaaagggactgacaaaggggcccactggaggactctttgccgagagccagtccactagacactcggcaaagaagcctcctttgccgagtgcttacgaaagctctcggcacagggactggcggtggggcccactggagccgtctttgccgagcgccatgatagcaggcactcggcaaaattggcctctttgccgagtgccgaagaagacactcgacaaaggatccgtcaccgtcacttggcaccgtgacgacgacttttctttgccgagtaccaaatggcactcgacaaagtctttgtcgagtgcccgacaaaaagtactcggcaaagaggccgttgccaatgtacagttcggcaaagtgtttgccgagtgttttatatgttttgccgagtgcctaaggcactcggcaaaggagctatgtccggtagtgttccttgtttttcttctcttcccctcctttttcttgagcgatgaaaatccaatgtgcgttttcttctgttcgcacaacgaatttattgcctcatatattttactgatctctacaatggtttatccattccttgtgtgtctgtcaatcagaatagcctaccatacgtgtctccttggaccggccagtgacgatctctttatatatacaagtactagtatagtgcccatgcattgcgatggcatacaaatataatgtccaaacttggcgaagacaatgcccatgtcatttgggccagcccaagtccatgcgtcctaccagatgtgatgctagagatactgtgtttccgattcactgctagaagcaatcagcatatgcaacaatcttaagagcacttaagagctttctgtgttgtgacaaaccacctctcattggacgacaaacatataccaaagttacaaggctagagtttttgatgtttgtcgttcatatcttttaattcccgtggaaacccacatacacatacctagtaaacatataagagccattgtaatgttgttcagtttatgacctatgcaataaacataaaagagcaaccacaccgttgttcaaaagccaaacagtacaccgtgaaaaccgtccattgaacaatccaaccacttggtccttcgtaacaggataacatgaactcaaatgcaaaatcaaattttaacggagtctagtatagctccctatattagcaaaatcattcaaatttcaggcattctgcactgcaaatacatgtaaaacaagaaaattgggagtctatttttgggaattgtcagttgagaagtggatttcttcgagcgatttacagtatctctgtttgtacataagcaactcttctgttcacggatacaatctctccagttacaaaaagatcatcagaacaaaacgtcttttgctacatcatctaagagctattgtcaaaagtgttggtaggaggaaaaaaaggacctaatcctttggcccatcaagaacatataagaagacaacccagagcctgcatagtattctagtagcttctgaaaattttattgctactattactttatcatcaaggctgctttagcagtacaacgccaggacaagtacaaagaaatgaaacatgaaacaaagtagaaaagaagccaaacgtgatggtgagaacagaggatcctctagctgaacacaaaccagatcaaaatttttgagaggattgcagcaccctaagaccccatgagcccttggatcgtgtattgaagagacttcgcctagtattccttaaaaagtaaagcttgtagagtcttcataacattataatttggatccaacttatgttgctagccctgtaataaaaatgaaaagaaatgaagaatcacaaacggaaaaaggaatgcctgcaaaacgtattcttgcaattaaagagacaatggtgtgatacacaaatagacaattacataaagcagtttatatagccacagtggaatcccaactgtttacaaatggacgcatcatctttagctggaaattagacaaacaaaagaactatatgaggagcaacatgtaaaagcaagcctaattctgatatacacacatacacaaacatacatacatatacatatacatataaggatcataaatggcacaaggataatggaaatagtagggccatgtctcagttgacattcgtgaagcttcatgatgcccttttgacaagttcttaaatagaagtttagcttgctgcttatagaaatcagcatccttctaatctcgcccatcatccaacccttctgctagtggacatccattagtgacacgagctatcattgttagcttcaccatggtgtcaagaaggccagaaccactataaagtactccctccgtcccaaattaaaatctgttttacctttttagtgtatgtgtcctatatatgtgtcaagattcgttatcatacatatgaatataaacataaaaatctagagctaaaacaactactattttgaaacggagggagtattgtacaaaaacctacatagctgtaatgaaaaacataaaatgggtgctcaaaaaataaaaaacaatccacttcaatcgtataaccatcagcctatcacaatataaaccaagacatcaaattaggaatagagtgtcatataaacccacctttaacttcattcgaagggaatgaattggatggctagtgttgtctagtgttctcgcagtgcatcttttcattgatctctctttatcaagacgaatgcaacaactgctctaacaagaaaagagtctgatacaagagggtgcagggtgatgggttgataaaaatattattgatacattcacaagcttttgcaacgcaccaatttggcacagtaaaaatgttcccatgaaagagtaaacacaaagacactcaaaaaatcatgcctaaagctgaatagtaaaagcacacatgtacacacattactaatcatgaacacccttttattcttt

SEQ ID NO: 6 - DNA, 238280 bp, Zea mays
  misc_feature (84056)..(84105): n is a, c, g, or t
  misc_feature (230712)..(230761): n is a, c, g, or t
tcgatgtttatttgctgttgtgcgatccacatccggaatggatggaaaggacgttgtgatgtttgatgaagtggatacaataaggccagaagcatacaaatcaaatcattgttatcggtgtagacgatagtgggcttacaacgaggacaaaacatgcatttaagatctgtttggatttttgtgacaagcagtttacctgctaattttagcatcttaaccttcaaacaggccagctaataaattgactaattgttagccggagggctatcaaactatttgactatattagccatctgatcttgctaatagctaataatagatcatataaagagaaaaatacatctattagctaagagcatctccaagagactagctaaataactcgccgatccaaattttagctactcaatagtaaattaaatctccaacagactagctatctgactcgcaagctatctgactctgtaaattctctctctcactagctaaatttggctatccacctgactagccaaactagatagatagtctgttggactgagatgctatatatagagtgtagtctttatgaaaacgtaaatagatagtcaaatagagagcaaaaaatgaagagtctcttagagatgctctaagtctctaaaggggtgtttggttttagagactaatttttagtccatccaatttattccactttagtcactaaattgtcaaatatggaaactaaaatagagttatagtttccatattttgcaatttatagactaaagtagaataaaatagagggactaaaaattagtctctagcaaccaaacactacctaaaataacctagctaatttttgttagctaattatttaccggttaattatgagccactaacaaataataagccacgagaacatggccttagaatctttcccggaaaagaaaaaaaatactggttgatccaaaactccagcggcgagtttgttccatctcgtgtttcgttccgcctgcagcgtgccgtgcatcctgcttattaagcgtcgtacgtaatgcagtgaacgtgacatcgtccgggtatggttgcgttatgcccgtctgaatcgtggcgccagctggtcttatctggattttttgctggggaaggttgcagcgtacgctacatctttcctctagatctgccttgttttccggtggataatctgtttccagcgtggtgtagacagcaactctacccgagcaactccaaagagtctatctataagataatttttttggttaaaaaaatacgctccaacaatttttaattacatctttaaatataggcatttctattttaatttatcgctagctagaaataaaagtaaggatggatttcaagagcgtgtataagatataataaactattgaagagtagaaaaaatatagaaagtggtttatatttaattgatctctaaatgataatttagaaagtggtttaaaaaaaaggctctcaaagagtggttttgctgtacagcgcaacggtacacgtgcaaatcttatttataccattctaaacctctagatcgattttctatgtacgatacaatcgagagattgtatgatacaactctaaccctataaattataaatatagttaaaagataaatatgggtgccattggttgcttgcacgaaccctcgttcaagcccaactcagccacctaccctgctcctctttggttcatacctcccattgaatcagactgatatgatgcaaacagtcgggcccgactcaccagaatgaaccattttgtccgcatggacttagccaggctggacacagaaaccgagacctggttttattcatccaattaagaaaccaatttcacttttgtattctgatattttgtatttttataaataaaactagatctcacttgttatatgtcgcggtttttagaactaggggacaataagatttatgtttggcagaaatgctagcgtggactccctacaaatggtgagctaaggggggctctgttgggggccttcgtcttccgaaagttctcaaaaacacgactaacatgttatccaagtataatacatgtacagggaccttcggccttgggatgaagctgtacacgatgtaaaaggcacggatcggagaagggtgaaccagttctgaagctaactatggagaagcttcggtttagcagaagaaaatggaaccgacctaaaagggaaaaagttgtctagtccttgatagactatccctaagtcaatagtaaacgtcaagggcatgaatgtaatttacacaggctgcgtcctgtgtatataaatagatgaacagtagcaccgtactgttcacgctaacttgtattcgctcgtgcgtcacatttggacttttgccttctgtcaagccgaaggtacaaatgtaattcaatattgttcactttcattcatgatgatttaattaagatatattaatgatgtcatatgattattcgagttatctctcatgcctcatatgcttctcctttcattgatttgtactgcgataatgaaggtattaccttcatgaccctcgtctgaagatcattatatcctaagggagataatgtttcgaaggacgaagggctttaaccattgacattttgtgttgccttgttcttaattcatagcatttgagaacaagtgaccaacattggcgcccacctccggtgaactcatttgaccaccttcggcaaaaagcgaccttcgtcatgccgccgaagaaagcttcagggctaggggctgcattgcagccactggacgtcaaccagaacacattgcgtgaagctcgaactcaaaagaggaaggctacaagcccgacaccctaggaggaggagctggaccaagagataagggatctcgaagctatccatcagcaggttgaaaggaagagagagaagatgcttcgtctttccgatctacagaagaagatcgatgaagttgctgaagaaatacgtcatctcactcaagatgaccaggatcgaagacctccataaagagagcttcgtcaagaaaattcctacaatgatgatgattggtatgacgatttccatcatggaaattttgcttttgatgatgcttctcctctatcagcagaactgcaggctatcccatggcccccatcatacaagccaccccaacttcccatgtatgatgggcactcagatccaaagcaatttctgatgagatacgaagcaactatatcttcgtatgggggcaataccgcagtcatggcaaagtccttcatcatggcagtctgaagtgtggcacagacatggtactcttctctccggccagggacaatcacgtcatggcagaagcttaaggacatgctgatcaccagttttcaagggttccagatgaagccagtcactgctcaggccttgtttcagtgtactcaagaccatgaggagtaccttcaggcatatgtccgaaggttcttgcgcctgagagcacaagcacctatggtacccagtgaaaccgtcattgaggccatgatcaaaggtctttggccagggcctacgaccagggtctacggcccaatacttcgctaggaagcccccccagacactggagaagctgcttcagaaaatggatgagtacatccgggctgacaacgacttccgccaaagaagggaggaagcttacagattttctgagatgactaggggcttcagaggaagagtccaccctaggtatgtcagatcaatccacagctctagccagaacgatgacaaaggaggccagtttcagaggccacaacacagttcacaatcttcaggacagcagcagagctccttcaggccaccagcttcaaggggccgaggcggcaagggcttcggaggaagatatggggatcaacccaggaaaatctattgcttattttgtggtgaggacaagggccacactacaagaacgtgtcaaatcaccattcagaagcaaaaagaaattgccaaagcagaagcccagcagaatcagccgtagcaggtcttgcatactgcttcgtgccactctccctacataccagaatatgtgggcaatcaaccttcagcctttgttgcttcagcaagccacacacaagcttcctggcctcagcttccaccgccacccccattacaacctacttatacccgaagccagcagccagaagggtgccaacacccacaacaacaacgtgacttcagggaggagtccgaagctcgtacggtcaacagcaccgtaccagaatcaaaacacatctactgagcaatatccttcttctgaaatacttttactttctatgccattttactttctgtacgaggaacaagcaatggaaacttagttttaatttctcgtaataattctgcctgtactagaatgaaatatatcttcttcacagatttacgaagctacaaaagtcgttcctaagggagcacatcgtaagtattttgctcaaaagtcgttcctaagggaatgcagtgtcaaagtcgacgaagctacaaaaagtcattcctgagggagcgcagtgtaagttctctgctcaaaagtcgttccaaagggaatgcagagccaaatatcgccgaaatataaggcgaataagttcaaaagtcgttcctaaggggatgcaaaacttataccgccgaaatagaaggcgaagaagttcaaaagacattcctaaggggatgcagaacttatatcaccgaaatagaaggtgaagaagctcaaaagtcgttcctaaggggatgtagagcttgtgtattccagtgtgggcgtgtgggtgtgtgtcttcggcatcctcatcattttgcatcatatcatcatatcatttcgcataacattacatcatacatcatattgcattaacgacacaagaaccgaatacgaagccaatcttcagcaaatgcttcgtcaaaatgaaaatgtgttaaggcacgaagtaagcttcgggaaataaagttttatcagccttatcataagaagggatctttttctttatgaagcatgaaaagaagggaaggtattttttcgccgaaggctcaaaaacggtatgtgcgtaaatttcatgcatcgcatagaaataaattgcaataatttacatatttgattcaatgttgcatacatcagatgttgcacagtttcatcacaaaaagaggtctaattttcctttattagttctatacatcaaagcttctcaaaataattattacaataaaacctattcctctctaaggactttttctgtaatttcgttcagtaatttgtcgacgacttcgtcgacaatggattcagccatatttatggtatccaatgattccttcatctctggatcagctaggggatcgtacggctccggtggcggggatagttcagctgaaatatgtaaatacattagttcaaagctataaagcaaataccgaagctaaataatcaagaaacaacacatatactccttcgcgttctgcagcttctttagctcgcttcgcttctgcccgggcgtcgtgggtgtctttttcactcttttttgcaatctcgtggcccagctctcggccaccgttcacccaaacatcgttataaaatttcccgcccattaaagttgcttcgactgaaggatccttcgtatcatctacagagaaggcagcttcgacctgggccatgcccttaacatgatcgcatccggccttctccaggatagctgaaattcctcgtgcaccggaaaacgcgcaaatatccccgcgatcacttaaaatttccttgaaagccttaacttctccacttattcattcaacaatgccttcgaggtcgcctcgtctgaagttttcttcagcagaataggcgcccactttggcgaagctagtttttaacttcttcacgcaatccaaggatttttcaaaacacctttccttggattcgcgaagttcttcaacattcttctctagcctaattttccaatattcactgatttcttgattagcctgtgcaagcgcgcagttctctttagcttcggctagctgtctccgaaggtcttcaatttcggttttctaggcttcgacttgagctttataattagcctcatcttcctttactttgttcaccagtgaaattaaaattttgtctttctctagaccttcgtttctcagttcaatcacctcagaccgaaggttgttaaaagccattgtacagctttcatcttcggcgctcttctgtgccctcaaggcattactaagaattaggccctgcaaagaagaaaattttttagtatgacattaacatatcttatttttcaacttcaaagctaacttttatacctttatactgttgtacacgagactatcagcgagatcatcctttgacataaccgaaaggccatcttccagcttcggaaatcccatacttttagctatctcccggcaaacggatatttctttgttgtccgggaggcagtataggaagtcatcttcgttactgccattgaacactaaggcccccttcggatattttagtctttgggcatagtgtctggcttctactatttcttcttcggataaattcttccccgaaacatgtcaaatgatgtagtcaacatctttgaccagagcttcgggagcaggagttttgggtttctctgatacaatttgccctgctgttttggcctcaggagcggcaggcttcgttttggtgggcactgaaggcccagcttcggcctgaacttttgcagcttcgacggttttcttaggaacaggtgttaaggccttcgtggtctctataacagcgtctagtacgctggccatcctcctcctcttgggagttgcagccggagttttttgcaccttcggcaaatctgcctctactggtgggctcaggatttttggcacttttatcaatttcaccacctgtggctcttcagccttatcatctttagcttcggttagcccgactgtaggcactccggcactacagttggctcttcagcgctctgcacaatggaagcagtttgtcttgcttcggcagctaaagagggccctttgccaagttcaggcaccatggccggttcaatgtatcgcggcgggtgggtcaagacccttaactttttgcccttcggcatagcagtagtggccaaagcgatagatttcctcttcttcccttgcctttgcagcggatagtgatagtcagggtatacgaagccaatggcatcaaatactctatttaatctcttcttccctcagcccccgaaagctacggacaaggcgtcatcttcagccctgctatatactccaagtagttcgtcgctgatagcctcaatacttttcagccaatcatcatttggctcatcaaaccggtctctgaacctgaaggtacactacaggaaacgactaaattttcgtgggccaaaaacccacgaaaataagcctaaaccgacgaaaatagcctattttcgtcggtagcgaaaataagttcgacgaaaatagggaattattttcgtcggtcccgacgaaaatgacttattttcgtcggcttcccctaggccgacgaaaatagttggtcggctgactattttcgtcggccactgaggccgacgaaaataggaacataattttcgtcggccgtgagcgctgtccgaggaaaatttatagggaggtaatacgtaggcaccacccaggccgacgaaaattcatgatacccccccccaaaaaacagatttttctgcaccttttattaattcacagcaaaataaacatatacacaatcacatatacagatttcacaaacaatacagttttcacaaacaacattcacaagcaattacataattgtttcaaacatattccatacatatagtccatatatagtccatacataaacaaagtcattccctccagaaccagaaacaaagtctatacatatccatacatagtccataaacaaagtcactactcactccggcgggctatgtgagttttggccactccctcctccgccaccaggaaggtggccactccctccagaaccatggacgaggaagtcttggacgttgacagcaccctccgatccctgagcatgtgacgctgaaccctgcaattcttcaatcattcaaataaggttgtgtttggtcaatatttgcataaaactaaacatggaacgtcacctgtgatccatggtgaggaggaggctgtgcatgcatccacgggtactgttgtgctggccacccctgaggtggtggcacccaccccgtcggtggcggtgccatccacgcttgaaatggctgagagcccgctggtggctggaagaccggtggcacccatcccgggactggctgcgatccttggggtggtggaggtgtccaagtgcctggaggtgcctgcgtccacccaacaccagtccactgtggctgcgacgctggagcttgtcctggccactgtccacatccttgtgcctgcgagccattttttataataaaaaaaagagttgctatggaattgaagtgttcagatagtgttacctggggagggcgaaaagctggcaagttcatatcagggccgagtcgagtagtcatttcctgcaaatggatgaaacgttagaatcgcaacattatactttgaattcaatgacgacacgtgatgagatagacggattacctgaaaataagaagccatatactgcgtcagctgtccaacctgctcctgcgctactcgagcctgctcctgtgctgctcgagcctgctcctgtgctgcccgagtctcctcctccagctgagcctctcgagcagacttggaggagcgagaactccctgccgaagacgatgctttcccttgacctaatgtcctgttgtactccacaacgccggtgccaaaggcaaacctgcatgatacacatagttgagccattaagtggacacattcttgttaatgaaattgtcgaatcaaagacaaccacctcacctgccatgctttctacccccaccactgtggtacaatgccgaggcatctaagtctgaatgcatccagtcgaaatcaggcccatggcgttgagtcatttcctccccatatgcattctgcaaagaaagttagagttggagttagacacaaaacatgcaatttaattcgtaaatacaacttgtttaccattttctcccttgccgcctcgctgcatagctcatcagggtttgccggatcagggccacggtgaccacggacgtaaacctccataaaacttggagcaactccactttcagcttcctgcatgaaaaagaagagttaaaccatataattttcatagatgtaacatacaagtttgatttatatacttaccatgcggcgtgcggtaccaaggtgtccatcggcgccgtacctatgccctggtccttcagtgccacggttgacacggtgcttgttggactctgcaatccactcaggcgacgcccatctctttgccaaccacctccaggcttccatgtccttcgccagccaatccacaacgctctccaggtactgctcctctgtgaggtagatctcattggcccctaatgctttgctcattttctgcccctttatcttcttgtagtagtagttgacggccgcgatgcgagcattgtacatggcatccttgatgaccttatcagcgcacttccgaaagtgcctcttcacacgtgcccactgagcctgatcgtcctcgatgtcatccggcaattggaacctcccctacatatcaatggagaagttaagttaaagtaagattaggagaagcaataattcagtgaattgcttatatacgaaagtaaactcacccagaactcgtcccacacagccacctgacaagtccttcgtttttttttccgaacttccccctccgctactgctttcccctgactcccctggctcgacatagtcctttagaccccagtcagcccactgcatagccgcgaacctctcgccattcagctccaccatgccagggtagtagaagcgacagaggctacccaacaccgcgttcaccttgggacgtctgcctgtaccgtcccaagtcaagtcttcccatgacctacaaacattaataaaacaagtaaaccagtgcaatcacgttcacattaaaaaattaacacaacagaaataagccccaccattctccatgcggccggatgagcctcctctcggcaggtctcggaccaagcgcattgctcttcttatacctaagtatacaagtaaattcaatatgatgaaatgattagaaactaatatcaattaaactaatatgcataataatacctgaaggacgtagaaccatctgacgcgtcgcccgcgctgcctgcccccattgggtcaacctcctcatcctgctcaccctcctcatcctgctcaccctcctcaccctgcacatgagcatcgtgctgaggagtctcctgctcaccctcctcaccctgcacttcgtctagacagtcgagaagttgctgctgcctctgtcggctctgtgaggtgccctgaaaaagcccactgcccgagctgtcctcgctggccgcgctgcccccactcctcctcgatctcctatgcttgaacatgttcaactgtagataaattaatgtcaaaccacagtatatgaaacaaataatatgaaaattaataatgtggaaattggaatacatagcttaattgattaactaaaagaaacatactaatcaaaagtcatccgcatccgatgatgcttcttcggctcgttgtttattcatacgctcttgatttcgttggatccttactgatcttctaacgacgacaggtcgtttgcgctttgacctaggttcttcaattaagtcgcttgaattgcaacagagattttcgagtccttctccattggtcacatggaatcggtgagctatgtcttgattcgacgccgcttctggttgaaaaacagcatcatcgttgtccctgctcgtactcacgtagtcagcactctctggagcgacgacttgtgggttgactttgattgcaacccaccaagccctaaggcttgggtgaggatatggcaggtagtacacctgttttgcctgatttgcaaggacaacatcgctcatactgctcggaatcctagagctatgcttcacctcgacattaccatacttgtcgacacgagtcccactatgagcatcaaaccagtcgcactcgaaaaacacgactttaagttctttggggccatcgaaaatcaactctacaatgttttgaagaacaccgtaatagtccactactttgtcatcgtcaacatatgaacttgccaacacaccactattggtggtggctgccaatggtcgactcttctccaatttcgcggttcggaagcgatatccatttacatcatagcgagtatagtttcggacggacatagaggtatgtgccatttgctgcaagtccgggtgcacagagtttttggaaacctatacaagtaattagtatatgcattatatcttccaagtccaaaattcaaagattaagtatggacaatgagaaaacgacaattactaacataattacgaaaccactgcacgaagtttggtccacctttcaacccatcacgtcgaagattttctaattggatggccgtaggtttactagtagatttccaacattcttcatcaaacatgctggacatattacaaacatggagattacacactatagaaattatgagatgagaaaatggacgtaactatgaggaaaaacttactcgaacgcctcctgtgtgctgtcaatattgctatacatatatagcattagcgtgttcaaatctgatgcttcaatgtgacgtacactcccttttccaactgctttacccggattcgcaaaaatttgaagggtgctttggggtgattcattttcgacatgaagtcgcactgaaggcgcaaacacattgttggctcgagcgaaatacctggttgagaattgagatatctccttaagggcaaaagcctctgcaatacacccttcgactctagccttgttccgaacagacgccctgagctttttcaacgccctttctataggatacatccacctgaattgcactggtccgcctaccaaagcttcccaaggcaaatgcacaattagatgttgcatcacattgaagaatcctggcgggaaaaccttttcaaatttacaaataagaattggaatttctttctcaaatttctgcatcaacctcttcgataccgtctttgcgcatacttccctatagaagtaactcaactctgcaaatatgctccaaagttcatccttaaaatagcctcgaaacatcacgggcatcagcctctccataataatatggtagtcatggcttttcaaaccgatcaatttaccggtcttcagattgactgcccgtttcagatttgccgcataccgatctggaaatttcagattcttcaaccacttaaatatttctttcctttcatccagcttgaggcagtaatcagctcgtggcctactttcatgccctttatcgcttactttcaactcgagcatcggcctcttacaaatttcagccatgtcttttcttgccttcatattatctttcgttttatcagtcacatcgaaacatgtgcttatgatgctttcagcaacgttacgctcttggtgcatcaagtctatgttgtgcggcatgatcaaggcttttgcatacggaagctcccatattgatgaaatatgggtctagttatggtcctccccgtagccttggaacctatcattttctccttgcttcagacaagcatgccatgcaattatctgcggtgcagtttgcctctttggtggcccatttctgattttggctccacctctgaatgcagtaagcgaattcctaaaatcatgcttgaatggagtccaacgtcgatgagcatcaaagaatgacactttcccaccatgcttcaatctgaatgcatccgtatcattcatacatatgggacagcacaaccgaccatggacacaccatccagaccaatctccatacgccagcagatcatgcactgaccacaaataagcagcgcgcatggtaaactccttttcagtatggctgtcataagccttcacacctctccacaattatttcagctcttcaattaaagggcgaacaaacatattcagctttggccctggatgctcagggcctgggatgactagtgcaaggaacatgaactcttctttattgaccaactcaggaggaagattatatggcacaatgaagacaggccaacacgagtaacggcttgcactggtattgaaaggtgtgaatccgtccgtcgatagaccaagccgtacactcttagggtcgtttgcaaattcgggatcaaactcgtcaaatgccttccacgcatcaccgtccgacggatggaccattatgtctggatcagtgacgagacgtacaccattctttggccacgtcatatgcagagctatttccttgttgaggaacaaccttgaaagccgaggaatgatgggcaaccgacgaagttgcttagctgcgaccttcgtaactaccaattcaccctcatcatttgtcacctcgacatatctagaagcttcgcaatgcttacaacggtccagcttgtcatcctcctcaaagaatagcatgcaactgttgggacacacgtcgatcttctcatatgtcatcccaagaccagccaacatcttctttgcgaagtacatattttttggcaacttatgattctccgggagaacctcgcccatcagttggacgatgtcgttgtaagcactgtttgaaatgttgtgcctcgactttatcgccattagtcttgtgagagtcccaagaactgacatctgagtgtgctcgtgcagtctctcttctcccgcggcgagtagccggaagaattcttgagcatcgcgtggaagctgccccggctcctcagcgttcatttcaacatccctaccaagatcatgcaacatgtcgtccatcctatcatgatcgtcatcaagctccacctccgtgtcaacgtgtctaatagactctccatgccggtaccatacaaggtagttcggcataaacccacttttgcaaaggtgtttctccatttcttccttcttctgaggccacttgttctcgcagcgattacaaggacacttcactagacgaccagttgcatctttgaaagcgtgctcaagaaaagcctttgttacacccatccattcattcgaatgtgccccatcctttctccacccgtcatacatcaccctccgatcaccgtccatttcaaaggctaaacaaaagtcaaagaacatcaacgatcgtccgtggcttaattaggtgaactccctattaggtaaaggccctaaacccacccaagagtgtaggctgatgcttgtgatttatgacgtgtagcctacgattgtcgcgaaatttcggcagcataaccccgctgctctccaagcacacgcctgaacatggtgtgttggagaacaactaggttacacaaccgaaattccgcgtcaatcgtaaggcacatgtcacaaatcacaagcatcggcttacactctcaggctgtccaaaatacgtggacaattccggaacggcgaacctcacaagccaatgtgacgttcgccgttcccgaacgggtgacacatacggttcgctacggttaacgattaaaactgaactctaaacattaaaaaataactcgacaagttaactcaaatcttaatcacaaggcgaccataccggagcggacgtgggaggacgtcgacggcgcgtgtccggagcctgggcgggttcgaattcgatggagcggtgaggagcgggtgtggcaaggggcggcggacggcgtgcccgcggcgaggggcggtggacggagggcgtgtggcggtgaggagcgggcacgggcgtgcggcacgcggcggtgaagagcgggcacggcgaggggcggtggacggcggcgtgttcgcggcgaggggcggcgaacggcgggcgtgcccgcggcgagccggtgaggagcgggcgcggcgaggggcggcggacggcgggctgcccgcggcgagccagtgaggagcgggcgcggcaagggcggctgacggcaggctgcccgcggcgaggggcggtgaacgggcgggcgtgctccgtggcgcgcgagccggtgaggagcggacggcgggctgccgcggcgaggggcggcgaacgggcgggcgtggccgaggagcgggcgcggcgagggcggcggacggcgggctgccgcggcgacgggcggggtgaggagcgggctgcggcgagcggcggtgactttgggcaaaacggaatcgaatcgagcgtgtccgcgggattagggtcattgtattttcgtcggcctgatttaggccgacgaaaatagaagttattttcgtgggtcggccgacgtaaatatagcggcccacgaaaataactgctattttcgtcggccgcaggggccgatgaaaataagtgtcgaattgtcgtcggccggccgacgtacatattagcggcccacgaaaataacctctattttcgtcggccacggaggccgacgaaaataactgctgtattttcgtcggccggcccacgaaaatattccagcccacgaatatttatgtgtttcctgtagtggtatatttcaatcgaatcaacccaccttcagtcaactcggcagtagtatccttcggcatatcctaattttccacaagtggccatattctatacgctatgtgctcttaaacaatatcccttgtaccaatgaaggtacatacgttgctaaaagccttttggcatgcttcgtcattctgatccattgccaccttcggtctccgaaggccaaaacgtgactagatagggcgttggatgatttccctaacgtcttctcattcaatcagatcatttttgacataaaaccattcttccatccaggccccaagccatctctttcggaatgtgggaactggatggcttgtgttggatcgggcaacgaatccgtaacaaccgaagttgttgtgatactgctctttcccggtggccttcgtctcgtacagaagttcatgcatgctgcaaaaatactttacgcttggttccaatccttgacttcttacagcccaaacaaacaaacccattctgattatagcttcaggggtaagttgatgaagaaagatttcaaatgtctttagcacttcaaccaagaacctgctcaatggaaaccgaagccctgctttcaaaaagcttcggtagataaccacctcatttgcttcaggagcaggagcaacgctgtcccctccaaccctcacaatagtcatatcacaaaagtatcttcctctcatggcatcaacgtgactctgtttgatagtcgattttccgaagatggtatggcttggtcgccacgaccgatcttcagaatcttcgtctccactttctgcgtcataactatcactgtcatcagaatctttggacaaaccctccattattttcttggtaattttctctgtatttgtcttagccatagactcgtaaaacccagcaatataaggatccatagatttcttttcttcatatagcttcttttcctctgataccttcttctcctcagccatcttctcctcagttatcttcttctcttcactggtcatcttctcctcagatatgaagcaaaacacaactctgaaactgaagctcgaaaattaagcaaaaaacttgcaagcaaaagttaaattttgagggaataacgcaagtagcagaaatggcgtatcaaataccaccgatagagatccatatttatacacccagttctttgcaacctggtgggccccgtctgtcatttactgttgctattctagcaaagggaaggtgttttttcggaccttcggcttaaggccttcgtccatatcacagtttaaatccgttattataacgaattaatactgcgagaggctactgttgggggcctttgtctttcgaaggtcctcaaaaacacgactaacatgttatccaagtataatacatgtacaaggacctttggccttaggatgaagctgtacacgatgtaaaaggcacgaatcagagaagggtgaaccagttccgaagctacctatggagaagcttcggcttagcagaagaaaatagaaccaacctaaaagggaaaaggctgtctagtccttgatagactatccctaagtcaatagtaaacatcaagggcatgaatgtaatttacataggctgcatcctgtgtctataaatagatgaacagtagcaccgtactgttcacgctaacttgtattcgctcgtgcgtcacatttggacttttgccttctgttaagccgaaggtataaatgtaattcaatattgttgactttcattcatgaagatttaattaagatatattaatgatgtcatatgattattcgagttatctctcatgcctcatatgcttctcctttcattgatttatactgcgatagtcaggtattactttcatgaccttcgtttgaagatcattatatcctaatggagataatgtttcgaaggacgaagggctttaaccattgacattttgtgttgccttgttcttaactcatagcatttgagaacaagtgaccaacaggctcgaaggtggatctgagacaaggggttatactggtttaggctagaggcctagtatagtgtagtgcttgacagtagtattgcttggggcgtgttacagtcactatcggaatcggctgctttgccacactcggcaaagagggctcggtgaacagtacatcggcaaaggcttctttgtcgagtactttttctcgggcactcaacacagtctgtgccgagtgccagatagtactcggcaaagaaaagtcaccgtcacggcgctagggtgatggagacggcgtctttgccgagtgtcttaggtggcactcagcaaagaagctactctttaccgagtgcctcctaatacactcagcacagaagttattctttgtcgagtgtctaccggccagcactcggcaaagaatccatcaacaggtcgccatgtcaggttctttgccgagtgctgtgtagggcactcggcaaagcattcctctttgccgagtgccagggccaccacgctcggcaaagaacctataccggtgcccaggtcttggttctttgccgagtgctatggtcatgacactcggtaaagcacctctttgccgagtgtcacactcgacaaagtgaccagtacacacctttttatttgtttttcctattctatccaaacaaacaaaagatacatcacagatatcacatatatacatcacagatatcatcagaggcataaatatccaacacaaacattaatatacaagttctcaacacaaacagtatcaacacaagttcagaagtatcaacacaagttcagaagtatcaacacataagtctcaagctctgacataagtattcaacataagttttgtagtctaaacactaaaaacataactctcattgaggtgggcggttggactggtgctgcgttgggctgcgcgtttcatgagggttgttggatgccgccccaagattggccctgcacagagaagagattgcatgtgttataccagatgcattaccaacatctaactacaattttgatactcacaggagtatggaatagagcagggtccattgtagggaacaatggaggtggcggagcgaaaccctgtgcggcgccaaggctctgcatgtattgaaacatcttcgccatcctctgctgatctgctaggccttccctcctctcttcttctagctgggtctgtaatattacaagccaacgttatagtaactcaaagagaaggtatataactcaaagaatgacgagttacagaagcactaacctcgagttgctgtatgcgaagctgtgagctgttgtaccgaggtcatatggctggactcgagcccgtgctccttgcccgcacatgagacagagtgggagtggaggacgagtcgattgccccatcggcaatccagtaccacccatgtctcttgcctcctccgaccctcatgagcacatcgaggtcgatttgctcggtgctaggatcatattctgtgccatggacctcctgcgccatggcggtgtagtcatgaaggcaggggttgctgtaggtctcgggcccgtcatccgggttgtaggtgacgtcggacgtcaccttgcccttatgggccatagcataggccgagaagatggagcaagcccgaccaccatgtgatgccgactgcatgaaaaccaacgagatagttagaaataatatctaatccaatgctatatacctaaataaaaaagagggcttacccatgcttctacatattggcctaggctgcggctaccttggtggtgggatgtcacacccggttccaggggggtagaaccgagcgcataccatatgtgtgtaatatatccaaagaacaatgcataaaagcgtaaataacgatttcattaacatattacactttgaacaggcataatgtcttaacctttattcatcaaagtacagcgaaacaaggacatccatccacaggaagatgaccgagggtatcactagactagcatccatggagttcagcatcatatcttcatctgcaacttctgatcaaaattaagcaagggtgagctcacttatggtcggggctcagcaagtgggggaaaaactaatgcaaggtaacaaggtgaggttaaggttgagcagtaagcattttagttggtcaacattttattaacaacacttgattactaataaatgtgaatcccaagtattcccattaaacaaaggtataagagtatatcaaaaacacttaagtgaaaccacttaagcaaaccattggcagatcatcggatctcgatttatttccatcttcaagttcaattatcatgtgaggagtccaggctgctcataaccgtgttcccgggtggtcactccatgttccaattaatatgcaataatcttgtttaaccatcgggttaacaacaatagagtaaacttaccatttggaacattaatatcataagcgggagtgagtgcataaagttaagttgtagcaatagcataactacgaaggtaaagtataattcccaggtttgatcaaggaataaggttggaaaggttatctaaataggtaacccgtcaaattatgcatacacatccaaaagagtaaactttattaaatgtattgtttgggatcaaatagagtatgcagagggagaagtccacttgccttgcttatagaaaacttgaggttcctccacggataggaatagatcttgattcttaactactagatcaaccactgaatatcacacaaacaaacaagaagaacaaacaccactcaataacataccacattcaccatgcgtaaagctaaaagaaagcttaacgaaaagagcgttcgcttttcaaaaacgtcgcaagtaacggttataataagagggtattcttttcaaaaatgtgtgatctatattttataaaacaagacatgagcttaaaaatatcttaattaaaatatacaaatatttggttcatcaatttaatcttttataaaacgtcatatgtgatacatctaaggttaagggtttataagatgatagaacatgttataaccatattaaacttttctaatcttttagaaaagatataggttatatctaatgttaatgggctactaatcacgttattaattgtagaagcattatggagcgtattgttaatcattcacttatgataatttaagatataagtctaaataggttttatgtgaaaagatcataattatattattaatcacttatttaagacgagttaggttatgagccttaagtggattttcatgcaagagataatgaacgcataaccatcatttaatgtcattaaaaagcatatggcctatattattatatttgaagtcaatatatataaagtaacatttttaagttataaaagaacttaaactcttattactttattttatcctttaagaaaaactaagtgattcgtatataatgtggattaaattctatgaaatcattaatcctgccataaatctagttaagaacaaattgaccatcggtttggttaataaattatgataaaggataattaatctattaattatctttaattctattgtaggaacaaatgatctaattgatctaattcattagaaggaatttatgcataaactatcattttagtttataaaagcaatgacccttgttatcttttaattaaggaaacatatatttatcttctatttttattaagaaacatatgtctatatattcttttaagtttctatttaatacggctatactcaaacatctataacgaaccttgttaaattaaaatcatgatgtctattaaaatgtcgttttacagttagaaacaaattctctaattctttagtaagaaacatatatttaccaacataactatcaatttctttattaggaaagcatgagtgcctaattaagttattttaatattattataaaattgtactatttcggttttctcctttctcttctaaatatatacttataactaaaaattgtttatttaattcctctaacattaatatactaagaattaattataaattactaaataggacttttaataacataatcatggtaattatgacataaataaatgccttactaattctaagttaagtgtcgtacttatgaatacatttattatgaatagtaaaatctatatatattttcattcgaccgaaaatacgtggcctagtatttcttctatttcttcatgcaaataagtttatacttaacatactactaacaattatcgttccacccacaaaagcgaaaacaaatccgtaaatcattctagtatgaaaatcactgaagtagtgaatagtgatcgtgtttatttttagaattataaaatcctacgcatattaaaagtgttgtcgcggggttcaactttggctacacgtaaacatcgcatctctagaaatcatacgcgtgaatcgccaaatcgcatcaatattacaacaataattcataagatcaataaagtaattcaaacacgatttagaaaatatattaacgggttggggttgttttcaaccttgagatgaacggacacggtcgtcggtgagtgttcggatggcgaggtacgacggcgagcggcgtggatgaactccggcgagtctccacggatggcaggcgattgtcgaacggcgtggtcacagccacgggatgctgcgcgaacggcgaagctccggtggggaacgtggacggtaactacggccgaaggcgagtgacagtaacagagaacatcacacaaggcaggggaccgggcaggaaacaatttgggcgagattgacgcggtgccagagaatagagcagcaaggcacgatgacgccgccgagcagagatgaggggcgagggaggagaggctcagcgcgggctccatttataggcgatggaggagagggaatcactgtagaattggtgccgattgaattcgtcgacgactaaaaacataccattaatggtgattgaatgggaagggagaaacggcagccgttaatggctcggcatcaatgggcggaaacggtcgagttaacgaaggatgaacggactgagcgcgacgtttcggtttcctggcagcgggtcgcgcgggtcctggccgagtgcgcggggtcggaccttggccggtcagggtcgcgcttggtcgcgggacacggcgcgcgggatcttcgtcggggcggcctcgcttgggcgcgcggggtctggcgctgcttggcgagtcggcggctcggcttcctgggttgcgcgcctgggcgcgggatggcgcggggtcgcgcggctgcgggcgtcgcgcctgcttcgcgccgtctcctggcgtgggcgctcgacgcgcggtgctccgcggggctgctcggcgccggttgagcgatcggctgcggccaggctgggcgcgcggccggctggaggcggacgtcgggcggcctggcgtcgcgcggggtggccggagcggcactgggtcagggaagagagcaggggaggcgagagaaacgggagaggagagggagagagaagtagaggcggcggctagcagtgagatgcagggagtggcggctaggagccaagggtagagggaggcacgactgcttgcttgcttgttgggcctaatgggcttagggtttggttttgttttcttttttttgtttttaattcccttttccaaattcgaaatacacttttaaatcactctaaaatttataatgattaaactaaaagtatttataaataatatagttatttttggattgattatattatttatttactaggatttttatttaagaagaaatgttattcaataatcaaaaaaatcaatcatgcgcgataaaaaaattactccaaataaaataaataataaccacttcaatgaaaaatttattaccataaataccattattaactaaatgtattatttttatttaatgattttcatagtgtcacatgggagggaccttgcatcatcagacgccgttcccggctagcgttgtgcgcctcgtcccactcaggcgagcaccatctatccaccatccgctcccagcacaaaggatgtgtggcgcaccaatgtggaatcatctacaaagtaaacacgtaaagtgcatatgagaagataaaattaaattcatgcatggagtatgtagcatcccaaaaattcaaatcttaaaatttctcaaacttgctctaaattcaaaataaattttaaatttcatttcaaaatgtttgtttgcgagttgatatcaacaaataaaatatagtggtctatattctctccaaaatcctcctcaaaatatcctacaaatatttccccagtgatccccctcaaattctttccagaaatactacccagatatttccccagtgaccccctcaaaattttccagaaatactgtccaaatattccaccgatatatctccaaatattttcctcctcaaaaataccttcagaaccatttttaaagtccccacaaatattttcttcataactttcctcatgctcatacgtatacgtatgcctccagtgtcatacggtgagctctacaagctaatctcacttatacaagataaatacatgctaatctcccactaatcctctcatcctcccactaatcctctcatccctccccctaatcccccaccatggctataaatagaggggcaagggcctcctctcaacccaccccaagccatttcatgacaactctctccctcccccccacacgcccactccacttcccacacaagcacacactagcacaaggatcgttcggtcgttcttcgatcgttcgttcacctgttcttagtttgttcgttcgttcgttcatccgatcgttcgatcgttcgatcgttcgtccaatcgttcatggttcgttcgtccgttcatccgatcgttcgatcgttcgtccgttcgttcgtccaaataatctttgttcagccgttatgttgccgaaattccgatcgttcgttccttcgatcgttcatcgttcgttcatagttcctattcatcgttcatcgttcgttcatagtccctattcatcgttcgtccagataatctttgtcctgccgttatgctactgaaattccgatcgttcgttcgtccgatcattcgatcattcgtccattcgtttatagtttctactcatcgttcattcatcatcactattcatcgttcaacgttcgttcatacgaactattcactatcactattcaccgttactattcactgttactattcgtcgttgctattcaccgacactattcatcatcattcctattcatcgatgatatctataattactttttcgtcgttactattcaccgttactattcatcgttactattcatcgatcatccaatcatccaaaatttcaactactcatccatcatgctgtccagtccacctaagactagccagacccatattccagtcatacgaactcggtgactgtgattttccttccagtagggaacttcccatctggtcacccatcccaggtttctccaagttgagcacgcttaactttgagattccttcgaaccaggcttccaaactcagattccaataattcttgtttctaaattcttatcaaactattccctatccaaccatgtcatcccttaagcatggttcatattccagaaaactcccgaaatactcttgtatattctgcctataatttccctattcagactaagtcaaacgattcattagtcactattctcaccaacagtgaacttcactgtgctacaccacatacacccagctataaatacacccagctaccctctccctctccacacccactcaacaccctcagccaaggcaacaccccacccactcagttactccgctctgccagctacacacatagtgtcgcttcgcctccagtccaccctcctggtaagcacctccgctccaccactagtagtatctcaacaccacatgacacagattctactcaagactctacccatccatatatcgctattttgaccactatactaaatatctgttgatatacttgctggtttgtatgtttgcttattcatgtcgcatagttatcagagcgttcgtgccgtctcgtggaggccagatctgcaagtctacgccaagcggtggagctagaagctagttccgcgagctctcccccctttcgccggataagcacggcaagctcactggatccctttgatgcataaattacctatgtttttcaaccacaaccctcagcttgttattttatacatgatatgattttgagacaagttattatggccacccagccgcttgctgcaatcaatccttgatatatttgttacaaatgatttgagaaaaggtgtgagttttcaaaataaaatgcttttcaaaatgggtatgatgaagggttttcacccttatcacctttgactagggttgatcagggactccctggtttaggggagggcctaaggtgatggctcagccgggttaggtgtgagcacaatgattgtcctctcatataaggatcggtttgtcatccttcactacatatactcatgacaagtacaaccactcgagactgtatgggtagtcactcaatctgaactcgtacggtccaaaccctagggttatgatggctggggagcaccgagaggataaggagggggaatgttttgtccggtttggacaaggcggtggcctgactccttccggtataaccgttaagctaaggacgtgcgaggaaagaaagagattcggatttgggtctcattggccatgagatcgcagagccagactagtgggtaaagtgtacccctctgcgcagagttcaaacctattcgaatagtctgtgtccactggaatggacgagtctgctgtggcatgacaattagtgttttgttttccaaaaaagggtgcttttgagaaaagtggtttttaaaaggtccagcggttgagccgtgagctatggtggacgggaagtccagtacctgtttttgaaaatgaaaaccagtgggaaactgctgagatacctggatggtttagtctaagggattttgctctatattggaaaacttcctgctcctttgggagaggatgcgctttgcaaaatacaaaatgttttacaaaataaccctgcatcaaatattgctatttctgcaaaatatcctgagctccacatattccatgcattatatctgatttcccccattctgcgggtgaaggtgggctgctgagtacgtttgtactcacccttgcttatttgttgtttttcagagcaggtgatcgctgatcgggtaagagttacgcatgttcccaaccttgcctgtggctgttggaccgctgaattgcttcgctgcgtatatcgggctgcttcagccccactctgataataggtcccgagttgtggaccaactcttaaagttgatcgccacctttataggtttgtctcttgtaggcagatctgaaatcatctgttgtataaatgtgtttactagcctcctaggactagtaattgtatcacatttgagtcccaaaggattgggggcgctacaggagtactggtaccaaacatgcatgactttacctgcaggtactggtccctggtcaatgacatggttcgggcttgctgcttggtcaccttctccccaaggacggagccatggtaggtgacgatggcctggattcgggcctcatagtgcatgtccacgacgagcttcttacagctcgtggtggccaccacatccaccctagcctcgtatccagtcacgtatctgaagaaatcctgcatacaaaaacaatgtatccatacattatttcaagaatatgcaacgaatacgacatattttacattatactaagacttacccatagctcttgcttcacccgctccgccttgttattgaattcccggccgtctcggtctactgcatcgggggcgacgacgtagtggtcgaagatgtaggctgggcctgtcactccggtgtactcaaccagtccagagaagtgttccctgcacaacaggccaaggatgccattggggttgcgacgatgacccccagcataatccacaaccatccaagacctgtccaagtgataaataaaaagtatttgtttatattatgattttgaacacataatatgaacaagaatgaagaacataaagttacatgcctctccccttccggccgaatcagcgggccgtctgtcccgaaagtatggggacgctgaggggagactcgcagggctcgcaggtagatgctcctcaaacctgaggcaccagaacctgaggcggcctgctgagcttcgtcgtcgtcctgctgctggtcgtcatcgtcctactgcgccgcctgttgctggacaaggtcgtcctggtgtgccacctactgtgcctcgtctatagatggccaataagcacgaggcccacgagcccgacacaaagtccactttttgggcccggtccgagcccggcactgcccgattctatgtgggcccgggccggcccggcacgaataagcgggccgggctcggacaggaaactaggcacggtgggctagcccggcacggcccgtttacctctaagcctattaagcccgctttttacactaaaccatgattaccggcccgcttagccggctttttggcccactttttcatgctaaacgggccggcccggcctgtttaggcccgctgcgggccaggctcagataggaaattgagcccgcgtgcttagctggcccggcctggttttctaaccatgtctggcgggccgggcctgaaacgggtcgggcttcactgggcccgggctgggccgggtgacccgtttggccatctctagcctcgtcctgctctgcctcgtccgtcgtcctgctcctcctccccctcctcctcagccaaccacccaccatatttgtccaaaaacctacagttaagagtaaacaaataagcacatataaaaagatgtatttaaaaataggtgtgaaataaaaaaagtcatatagcattacatcgattaaaaataatcttcatatgtgtcggggttagccggatcataactctcatcatcactatcaaccatttcatagtcaacaccatcagaaggcgcaagtttgtcattaatgtcattgccttcaaggattactaagtcattatcattttgcacctcatcctcctcctcatcaacaaccatttcaatatctacgtccatttcgatagcttcggttaagtctatttcaaatcgcccttctagcccatcttcttggaagaactctccatcatatgtgtccaggtctaagttataatcttcatcgttaggaacaggtaatctcctgtgcggcgataccttatacacaacatcccaacccttaagatgttctttcgtttggcacgcatatgggagataatacacttgtgtggcctgttgggccacgatatagacatcgtctcctaataaggtggaatcttgtcgaatttcgactatcccaagattagaatgtgtccatctcgtcacttgagggtcaaaccaatgacatttgaatatcactggagtaagaggtttggaaccataaaaattgagctcgtatatttcttcgattcgtccaaaataatcgacatcgtcaaggccgggcataaagactccagaacacgttgttttctgattgggctgactttggtcgtagtttgttgtgcgaaaacggtatccattgacgtcatgcccagaatatttcttgaccctataagcaaagtcgttggctacttgtctcaactcagcactcatagacggacctctttggccctgcaagtatttgtaagttaaaagacgctaaattgagttcataaacgtatctctttgacaaactaagcatgtaccttacgtttgaactaggaaatgaaatcgggcaatccatttctcgcaccctttctaagaagagtgtcatattcctatggagtagggtcccttgatcgacgctagaattcatgaaaaaattgttccatgtatggcgtcacctcttcaaggttggtcaatacatatagcatgatatgtcgccactcttcatgtgtcagggtcttggtggtcgagccacttgcgcttccgagttggcctcgaaatatgctaaggttcaattcattgccgccatcattgtaacgaggggtggattatgcacgctcggcagtttgtctccataataagttgttgtgaagtttgacacctcctctagaatgtatgcctctgcaatggaagcctcgattttgcatttatttctacatttctttcgaatagtctttagacatctctcgattggatagcaccaacatccctgcacgggccccccattcgtgcctcataggggagatgaagaatcaaatgctgcattggattgaagaagccgggtggaaatatcttctcaagcatacatagtaacacaagtgtcaatctttccatgtctacaaccacggtccgatataactcttttgcacaaagctgatggaagaaatagctcaactctgaaagcgctagccagacatgctcagggacataacctcgaaccatcacaagaagaatccattcaatccatatgtggaagtcatgactcttcatctctaagactcgcatagtagataagttcaccccctactcaggttagctgcatacccatcagggaacatcaacatcttgatccactgaagtacttcctctgggccctgcttaggatgaaatcggccttaggccttctccatgtctttccaccacttggcggcttcatctcttggtttggtctatcacataacgctgccagatccacttttgcctttatgttatcctttgacttatcaggaatgtccataattgttgcccacagtgcctcggcaacatttttttcagtgtgcatcacgtcaatgttatgtggaaggagcaggtcgtcataataggggagccgagtcaagccagacttatgtgtccacatatgctgctcaccatatcccacaaaaccaccttctgtattggccacgagcccatctatctgttgacgaatttcagcaccagtcatcgttgcaggtgggcggtctgtcactatgacacctttcgtaaagttcttgatgtctaggcggaatggatggtcaggagggagaaattgtcgatgtttatcgaaggatgaatatttgccacccttttttaaccaaatgaacctgagagcttccttgcaaactgagcatgggaacttacagtgaacacaccaggcgcagaatagcccatacgccagtaagtcatgcattgagtactggtaccaaacatgcattctgaagtttgtctttgtagctcggtcatacgtccatacccctttctcctaggcacgtaccaattcatcgatcaaaggctccatgtacacgcccattttattacccgggtgtccgggaattatcaacggcacgaatatattctgcctttgaaagcacacaccagggggagattgattgggataacaaacacgggccaacatgtgtatggggcagcgctcattccatatggattgaacccatctgtggctagcgcaacacgtacattacgagcctcttcggctttctcacggtgaatggcatcaaagtgtttccatgattcaccatcggatgcgtgcaccatcttgtcaggattgtatcgttttccatttttgtgccatgtcatctgtttcacggattcctctatcatgtacagacgctggatcctcggtatgaacggaaggtgccataggattgtcaaggggatgttgagctgcctcttctgtccatcaccagagtctacctccatgaacctagacgatttacacttcggacagtactttgcctctacatattctttcctaaatagcaagcagcccttcggacaagcatgaatctgctcatacgtcatcttgagtgcacgaaggagtttctatgcctcgtacatgctctttggcagaacgtgatcatccggaagcaggctcccaataaccgtcaataagccatcgaatgcgtctctactcatgttgtactgtgacttgaacgtcattacacgcccaatggcatccagttgagaaacctttgtctggctgtgaagaggcttctgtgccacgtcaaacatgtcgtagaacgcctttgtagtcggctctggctcgtcatccatacgtcctcccgtcaactgtgcctcctgatagtcattcaacctatccgctacccccgcatcggcatcataatcctcgacacgttgtctcagcacttcctctctcgtacgatgcgcttcaccatgaaagatccaccgagtatggcccggcgtaaatccattctttaaaatatgttctaccatggccttctttggttttcttttctggttggcacatttgttgcacgggcatgggactagactcgctcctttagcagcttggccatatgcctgttccacgaaatcatcggtctttctaatccattcaggggtgacatcgttccttcctctacggcccgtgtacatccattcacagtcctctatcctctaacagaagcctagcaatagaaaattttggcagcacctcccctgcacggggaggtttataaaacctgcaaataaaactatcagcacgatggctgacatccacacataattcaacggcacgatggccggcaatcacatataaccatagccacatgcaaaactacatttaattcctatagaccaatcatacgcatatattagaaatgtaattttctatagaccaaccacatgcaaactacgtttaaccacatataatcaatcgcatgtgatttcctatgtaccaaccatatgcatatattagaaatgtataccttagccggggaagatggcgaagatacggggtgtccggagatggccggagcgacggtgattgatggagatggcgcgacggggaggatggccggtgaattgccgggtcgagcgcgagcggcggcggcgtgcgcgggctgtggcgacagcgcgcgcagaggtggcggtgcacggggcagggcgcgcgcgggggaggcggcgcggggaagggcgcgcgcgtgggggagggggcgcgtacaggtggcggcgcgcgcggggtacggtggcgatgcttggggtggcggggagcggggccgggagcgcacgcgggcggcggcgacggcgctcctgggtggcggggaggggggctgggagcgcgcgcgggtgggggcggcgtgggggcgcgggcgtgggcagcgcgctcaggcgatggcgcgcggcgagcagggggcgcgtgcggcgagctgcggcgagcggtactgagtagtgagagagagcgggggcggtgcggtgagagtctgttattttacttcttttccgagtgcccgcgatctggcactcggcaaagattttttaaaaattaaaaaatttactttgccgagtgccccagatctggcactcagcaaagacgtctttgccgagtgcctactgtcaggtaatcggcaaagactggacttagggtttttaaaaatactttgccgagtgtcacacggctggcactcggcaaaggcttctttgccgagtgtccaagcgtgggcactcggtaaagtatatttttatttttttaattttggcaaccaaactttttgtggtatgttcctacactatgtagacctacatgtaccattttgggacaattataacaatgttttcaattgctagtagatttagttcgtttattgaatttcttcggaaaattcagatgtgaactgcaagtcacacgaaacttggaaaaccgtgcatgcaaaaatgatacccatgctatttagcacaagttacgaccgatttcaggagcggaccagaaacttcgagcaacatgctcactaaacatggccgtgaacttgccgtccacatgtttaaaaattgtataaaacacaaacaaagtcagaaaatcatgaaacttgtccacgtgttatgatatcatatatagagactgtgataaaaatttaagaaagtttcgagaaagctgggacgcactatgtgtagaaacctaagacatccacactgtaaacgagcttgttaccgagtgcaggactttgccgagtgcggctctcggcaaaggcttctttgccaagtgcccaacaaaaagcactcggcaaagctcttggcactcgtcaaaggcccggattccggtagtaaattgggtgcttgtgtgaagctgaggtatatcttggatgatggggttgtcttgcccttttatagctcaagggtagacgttacaataaaaacttatattttactagggtgaaggttgtcctcctgcttctaggcctcgtagcccctatggcgtcgtctactgggttgtgcttctaggcctcgtagcccctatggtgtcgtctgctgggtcgtgtgccgctgtacccctggtatggcgtcgcgtcttgtccattcgctaatgggttcctatacctattccgatatagacatagcggtgcttggtgggtcctgcccagtcagctcaaggtgaagtttagggatttctgaagtatagcttcatcttctgtcatacctttagtgtcatctttcatcatgcctaggtatatgcctggtacagtgtattgctagtcccttctggcgtatgggtcactgtagagaccctgatgttgaggtccctgcggctagggatgtccggtcacagtggtcaatggggatacgtatccaacgtcgtgcttgatagagacccttcagtaccacttccatggtctggacatggcttggtaataatctgccccatcatgccgtcgtggcttgatagtactaggtcggctcttccctcaagtagacatgttcttctgagagccagttgtcatcttgctaggttgctcggtaggaaggttgatctcgccagcccaacctcgccgggttgctcggcagtatttgttcatcgagcggattggtcggtaatcctgcctcgtgtgcgtcacttgacgggcgggttggttgacagtctcgcctcgtcgagttgcttggtaggtgggtcggtcggttagtgggccatccttgggaggcctttcgggccttctctgggtacctggttcttaggtacccaacaacagccctgaacctttgtgtaactccttgaagttacatagaggcttttcttgagcgattgccttttcgggagcgagcgagcacatctgttagatgtagcccctgagtaatccatgtggattgctcgggggtttatcagtgtaaggggtgtaccctttcctgcgatggttcgtcacgcaccgggcatgattccattggccactgcctggctcacttttgatggttggggtcttgagtgcatgcgggcgcatctgctagacgtagcccccgagcccccgagtagtccatgtggattgcttggaggttcacacagtgtgagggtcgcacccttttctgcgatggttcgtcaaaaaaccgggcatgactccactagcctctcgggtgcgcacgagcatgtcagctagatgtgcgtggggaacagatttcttctcctagtcttcgtgtagatctcttgacttgccatgcccttacctcgtctaatcggagtagagcgcaggggtatgttgcgacataggcaagtgctatcgtgtgtagggatgctcaggcgacgttgtcttgtcttctcctcttgtcacccttcacttcggtgctgtgcgtgctacagtgggggtcatgatggtggcagcgcacgtggcgcagagagtctaaggtcccgccttagtaacgcgcgagccactacgtggcccgtgtacttcgattgtagcgcctgccgctagagtggtcaggtatacgtctcgtccacagttaatgcagaggcgcactatactacggaggccgacatcgagtttccctggtggtccatgttacgtgtcgcagaatacacgacaacggtgggcctcgccctgtgagggagtagtagctgataccgctcttccttaatgcagctccagttcaccccctcgcttggtgacctacaaaaaggtgtccctgcacacgaccctgttatggtgctcagcggcgtatctatgggtcgtcattccgaatgcttttaatcttctggattttgtttatggactttgtcgaatcagcgtactgtgctgagtgtcagacagaaaacactcggcaaaggcgcttctttgccgagcgctaaagtttggcgctcgacaaagataacggctgtcagctatggatggctgctgacagccctttgccgagcaccaccgtttgacaaagtgaagctatagtgaagctgaattatgccaaattgggcctacatctccctattttcaaccaaatgcttcagggtttcttgtaatcgacatgatttgtttcttcataaatagtactagttaggtgcccgtgcgttgcaacaatccacgtcataatccatattggattccccaatttattaaagaaaaagggagcaatcgaagaattagagaaagatctccaaaaggaagttaattctgtaaaccagagacttaatattgctatcgaataggttaaagaaccttatagacaacctaatattcttgcggaatatatagctttccaattaaaaaatagagtttcattctgaaaagcaatgaaaaaagctattgaattaactaaaaaagcagatataaagggaataaaaatccaaattgcgggggcatacaaaatattcaacaaaatattagtgtccaacgattacagaaaaacgagcaccacatatattattgacctcaatgtctcttaatttcattggcaacaaccaatatagaactaaactgatacaaatcagtttatactacaatacgaatattagaaaaaaacaaagttacgaagtaagtacaatgcctacgcgtcgcgatgacataaatcatatagtaaggcgcttgtgctaagtatacgacaaatctaaaagatcaatatatcacaaattcattggcaacctacaataataacaaacataaaggtagttaaaatgcacagttagaattcttcacatctattttggcaagtctccattacactcgtaacaacaaacaagttagaaatgattgtttgaccatttttcttaaaatagtcctaggtggaccattgagcgagcaattttccatctaaggccttgtttggttattcctattacacaaggattggatgggattggaaaaaattaagaagtttgacttgcttggaatttaaacccacctaatctcactcaatccacatggattgagtgcgaaccaaacaagccctaaccatataaaacgaatatccttgttttctgggcaaaccagttggggtgttataaaggagtgaaatgacatgatgttacagctccctctcgaaaggtaaaaatcaatgacaatggtatatgtaaaggtgataaacaatttatgagcacattgaatcctataatatagtgtatactaatatcatgcagacatatttcaactggcaaggttaaaagaaccctaacactaaactaatactcaccttttgtccacaagccaatgtaccatcccggaagtgataccctattacccttagtcactgaagaagtgtcaagtttaggcatataagatagaaccctaccaggttgtaacacccactttgtaatttgctagaaataataccaatagagaaacaattcctcttcatatgagtttaacctttatgcatcatcccatgtgaacaccatatgaataaaaaaatgtatgccaccaaattatgcatcatgctggattttattttgtgtgcatattgtgagaaaataaaataaaattatgacaaggaaatatgttaaagtccaaagtggaatttagaaaccctaaagaaaagtggagggaggaaaaggagtacaaaaataaaataaaatatatacaagacaagtattataactaaaagtaagaccatcatgttcaaattatacttttaatctaagaagaattcaccaaaagatttaagtgtgaaatttgaattcaaatgggatgggaaaaatataaatcagaaaaaggaaaagaaaaataaaaagaaaaactagcacatgggctgaaacctatagagccggcccatctaaggagttctccacgcgaacccagctggaggagagtggcgccgacatcttgggtccaccgggcagtcacccacgcgcgtgtacgcgtgactctgcggctggtctgtgggcccgtccggtcagaccgtcgcgcgcgctcacagcgttctctggccgatgggccccactggacagcgcccttcttccctcagctgccgatagctcggctcactggaaacccgggcccgcgcgtcagcgtgttcatcttcaccgccaactgaatcccgaccatggtgggcagcgcggtcttctttcccctttctccggagtcgctcgccacgttctcaaccccgatggctctgtggataaaggcggggctcacccacttcttccccgtgctcccaccactgaatccaccgccgtgcaccattaaccagagagaagagaggagcggccgccgcgagtaatccctgcaaagccgtcgatccggtcctcggtggggtgtccgcgggcttcatctggccggtagggaggcatccgtggcaaaagcactcggaatccgtcgcgggcctcgccggaattcctcaccgtacctcgtcctccgctgcgcgccgcgagcagaagactaccgccattcaattgaggtactaacgccatccacgtgttcgcattgttgttcagtaggtttagcgttagctaatcgcattttggacgacccttgcgcgtggaattgctcgccggcgttcatcgccgcggcgggagggcggcgccgccgtgtgagtctgcccagttggggcgataaccgtgcgccatcggatcgttggcggacggccgagattagaccctagcataccccttcgtcgtattgaatctagcgcgttgaaagggaatcgtgtggccgagagggagtaaagggcatcgtgcgccgtggaccgcggatctgggatccaacggttgtcagcgtagcagtgtatataaccgggtccgggttaatctggacgcgtgatttctaatcggacggccgacattaagcgataccctttcgctctggcgttttgcttaagagaccctaggttcctttgaaatagaacccgccatcctcgggtgctgtgctctgagtcttaagagttttaccccgagccccctgacttttctggaaaatgaggcccagtccagagatcgtttaaattgaataaaggaaatagaaaatagatttttaataggaaaataattgctagaactttataaattcatagaaaattcatactaactccaaatcactccattccagttcctaaaattttgtaattttattctttagcacctagagcctctgttatgtcatgaaaacagtaagaaaatttatttcacatttaatcctattttaaacacataaaatctttgaaaatgcataacttaaaatctataactccaaaaattatggttcctgttcctggaattttattttaatgtgtagattattactgagcattttatttttatatttggtgtaatgttaatttctctatatacactgtgcttgtttgtattgtggcgagtagaagagcccattgctgaggattctggtgagcagcaggtcgaagtagctgagcaggagctcattgaaggcaagttgtgcccttgaccactttttacccaataatgttctttaatatcactcatccatgcaaagattaattttgatgggacccaataggtcaccctagattgtttatctcattaccttgtttacccctgaatcacctgggtagtttgctattgctttacatggttttgggataatcatttattatacctatgttccaattattcttgttattctgtttatgttcatgtcaagttcattaatgttaattggaacatagagcttaacttgaaaaccacgtgccaccacaagggtttaatgggacgcccttggctgactaattaggaaagctagtggaagacgaccttacccgaaaggggcaagggcagtaggggagtggtcagtgtagggaggtccctggttgattttgctgcgatggcggtcagccaggaaccctgcattggaacttcctgtaaactgtagcgggttttcggaagctagtggaactttgtaaaggcctcgtagtggatccctagccattcacctcggtagtgtctaagggcctagctaaccctggcgacatgggaaacacgacttgtgggtaaagggtacaacctctgcagagtgtaaaactggtatactagccgagctcacggtcatgagcagctcaggactctctgatgtttaaattatggaacttaaattcaattttgtcatttgcattgcatgggtttgttataaattgtgttctattactttacttatggtttggtatttacttacacttagtaactgctaataaaattttgaccaactacttaaaagcaatgctcagctttaacccctttcattgattagccttacacatcacatgaactcacacctttgtgagtttatgtccactggttccccacaacttgttgagctatgatcatgtgtgagctcacccttgctgtctcacacccccccacaggagatgatcaggtggttcaggaggagccgcctaacactgaggagttcgatctgatctacgtggcgtttcccagtcaacattggcgccgacgatccttagttcgttttatggttatacttttattttgtaataagtcttccgctatgtaataattactctgatgttttgtgacattcatctctatacactctgttattatatatgttgtcttctgggcgcatgtatgagatgcacctggccttgttccttaaagccgggtgtgacagaagtggtatcagaggaatgttgactgtaggacgagacctagatagaaatggacaaaccctctcctacttaccttactctgacttattctatactcatctcatcttgatcttgtctcaccttttgctattctactctgattaatcttatcttttctactctaagacaagatggatctcacaccttggaatcctaccactatgatctttttaagagataggaaacctaagatgaaaacaaaactattttctctattttaaaaatgttggttgattgttctgatgctaaatgcctgatttgcttctttgattgactgaattattatagagggacatcttagtatgtaccaccataagataataaattagctatggtaggtaaaatattaatctgcttagctagtaaaattccccaaagtaacctgctttgtaaatacctgccttgtctactattttcttaccatatatatctaactcagatggtcaataccaggtggggtggtggaattgatttgcctcctaaccaacacactcgaaggatatatagacaaccccagccacagcctgcagagatgaatcctcctaatcctccaccaggcggagttgacccactggttgctgctcagatggcggtgatgcagcaaatggcagacactatggctgacatgcgtgcccagatgcagcaagaacgccaggagatgcgtcaggaaagagaagatatacgccaggagttgcgccaggagcgagatgagatacgacaggaaaggagggcacaacaacagcagctgcaacaacaacttcaacaacagcagcaacagcaacaagtgccactgcctccaccaccaccaccagttccaccccgggacaagcatagggagttcatgagtcataagccacctacatttgcaagctcgcctgatccactagacgcggatgattggctgaagtccgttgaaaagatgctgaatattgcacagtgcacggaccgggagaaggttttatatgcttcaggacgtctgacaggtcctactactgattggtgggattcttatactgctgcccatgatgctgcggatactattacatgggcagagttcagtacacagttcagaaactaccatattccagctggtatgataaagatcaagaagaaggaatttttgtcgctgaagcaaggaagtatgtcagtcagcgagtaccgcgacaagtttattcagctatccagatatgcccctgaagaagttgctgaagacgagaggaagcaggagcattttattgaaggacttaatggacccctgcagtatgctctagtggcacacacatttccatcatttcagagactgttggataaggctcttgctattgaacacaagcgtgttcagctgggagatttgaagagaaaggcaatatctcaaggacaaggaagcagcagtgttcgtcctcgctacagttcaccacagggtacaccgactcgaccaggaggaccgcacccagttcagcaatcaccactgaggactccacctcctcgacaggctacccctactggcaccccgacgaagttttcaggacagagtccaggcaccacatgtttcaagtgtgggaagactggtcattatgcaaatgtctgcccacagaggatggctactactccagttcagaacaggcagcaaactccaagttctggcaagggatattctattgccaaggttaatcaagtcagcgttgatgctactccggatggaggggacctcgtaattggtatgttttatgttaatgcaattcctgcaaccatattatttgattctggtgctacacattcattcatgtctgctagatatgccaacacaaatgaaataccactgctaaatatgagaaaacccatgatagtaattacacctaaagggcatgttgaggcgaatcaaatgacacgtagattgacattgaccattatgggtagagaatttggagctactgctataatattagagtcaagcaatatagatctgatccttggtatgtcatggctaagaaaggcaaaggccgttatagcatgtggtagaggtaccgtagaactcaccaccactaaaggagaaaggtttcaagttaatattgcagtaacctcctcacccatgcgtgcaatgttctttataccggaggagtttgttggtgacaacatccgggtggttagagattttccggatgtctttccagaggagttaccagggatgccacctgatagagaagttgagtttgttattgatctcttacctggaaccgcccctatttctaaacggccatataggatgtccgtagaggagttgaaggaacttaagaagcagttaactgagttacaagaggctgggtacattcgtccgagttcctcaccttggggagcaccggtcttgtttgtacagaagaaggatggatcgcaacggatgtgtgtggattatagatctcttaatgatgttacggtgaagaacaagtatccgttgtcccgtattgaggacttatttgatcagatgagaggtgctagagtattctcgaagattgatctccgatccggttaccatcagatgaggattagaccatcggatattcccaagacggctttctcgactagatatggattatatgagtttactgttatgtcgtttggattaaccaatgcaccagcttattttatgaacttaatgaacaaggtgtttatggagtatttggacagattcgtcgtggtgttcatcgacgatattctcatttattctcagagtgataacgatcatgaggaacatctgaggttggtgctacagaagctacgagataaccagctatatgccaagttcagcaagtgcgagttttggattgacaaggtaccattccttggacatattatttctaatggaggaatagcagtggatcctgctaaggttaaggagataatggagtggagagcacccactatagttactgagattcggagtttcttgggattagcaggatattatcggagatttattgagggattttctaagattgctaagcctatgacttcacttttggagaaaggaagagaatttaagtgggatgagaagtgccaagacatctttgagcaattgaaaaagaggttgatgtcgccaccagtattggttatgccagacctacagaaaggatttgatatctattgtgatgcatgtggccaaggcttaggatgtgtgctcatgcaagaaggacatgtgattgcctatgcttctcgtcagttacggaaacatgaattgaactaccccactcatgacttggaattggcagcagttgtgcatgctcttaagatttggagacattacattatgggaaccaagtgtcaagtatatacggatcataagagtctgaagtatatattcactcagaaggatctcaaccttaggcaacgccgttggttggagcttataaaggattatgatttggagattcactatcacccgggcaaggcgaatttggttgcagatgccttgagtcgcaaggagcatgttcattcagctattgttgcccagctacccgacgagattgttgaggatttcaggaacttggggatagttgctcatactgaaggggttactattgatgtggaacctaccttggagcaagaaatccgcaaaggtcaacttgacgatgctaaaataaaagagattaaggatctgattactgaaggtcgagttccggaatttacggaagatgagcaaggcactgtatggttcaaggacaggatgtgtgttcctgatattaaaagccttcgagagactattttaaaggaggcccatgactcggattattctattcatcctggtagtactaagatgtatcaggatttgaagcggaagtattggtggtatggattgaaaagagatgtggctgcacatgtggctatgtgcgatgtatgtcaaagagttaaggctgaacaccagaggccagctggactattgcacccactgaagatacccgagtggaagtgggaagagattggtatggatttcattactggattgcctcgcacctagaaaggatatgatgctatatgggtgattgtggatagattgactaaagcggctcactttattcctgtgaagactacttataaaggttctcaactagcagagttatatatggctcggattgtgtgtttacatggagtaccaaagaagatcgtgtctgatcgaggttcacaatttacctcaagattttggagaagctttcatgagaacatgagtacgaagttgaatttcagtacggcttatcaccctcagactgatggacagactgaaaggactaatcaagtattggaagatatgttgagagcatgtgcccttcagcatggaggaagttgggataagagtctgccttatgctgagttctcgtataataatagttaccaggccagtctaaagatgtcaccttttgaagctttatatgggaggaagtgcagaactcctttgtattgggatcagactggagagagacagttctttgggcctgaattgattcaagaagcagaagaacaagttcgtataattcgagagaatttgagagtggctcaaaccaggcaaaagagctatgctgataatagaaggagaccactggaatttgaagaaggagattatgtgtatctcaaggtgtcaccacttcgtggaatgaggagattcaaagtaaagggcaaattgtcccctcgctatattggaccattcttgatctttaggagagttggagagatggcataccaactcgagttaccggatagtctatcggatgtgcataacgtgttccacgtatctcaacttaagaagtgtctccgtgtccctgaggaacagttaccaatggaagagcttagtgttcagggtgatttgacttacacggaatacccgatcaagattttggacactttgactcgagttacgaggaataaggtgataaagatgtgcaaagtgcaatggagtcaccacggtgaagatgaagcaacttgggaaagagaagaagagcttcgtatagattttccccaccttttctctagttcttcttgaatctcgaggacgagattatttttaagggggtaggatttgtaacacccactttgtaatttgctagaaataataccaatagagaaacaattcctcttcatatgagtttaacctttatgcatcatcccatgtgaacaccatatgaataaaaaaatgtatgccaccaaattatgcatcatgctggattttattttgtgtgcatattgtgagaaaataaaataaaattatgacaaggaaatatgttaaagtccaaagtggaatttagaaaccctaaagaaaagtggagggaggaaaaggagtacaaaaataaaataaaatatatacaagacaagtattataactaaaagtaagaccatcatgttcaaattatacttttaatctaagaagaattcaccaaaagatttaagtgtgaaatttgaattcaaatgggatgggaaaaatataaatcagaaaaaggaaaagaaaaataaaaagaaaaactagcacatgggctgaaacctatagagccggcccatctaaggagttctccacgcgaacccagctggaggagagtggcgccgacatcttgggtccaccgggcagtcacccacgcgcgtgtacgcgtgactctgcggctggtctgtgggcccgtccggtcagaccgtcgcgcgcgctcacagcgttctctggccgatgggccccactggacagcgcccttcttccctcagctgccgatagctcggctcactggaaacccgggcccgcgcgtcagcgtgttcatcttcaccgccaactgaatcccgaccatggcaggcagcgcggtcttctttcccctttctccggagtcgctcgccacgttctcaaccccgatggctctgtggataaaggcggggctcgcccacttcttccccgtgctcccaccactgaatccaccgccgtgcaccattaaccagagagaagagaggagcggccgccgcgagtaatccctgcaaagccgtcgatccggtcctcggtggggtgtccgcgggcttcatctggccggtagggaggcatccgtggcaaaagcactcggaatccgtcgcgggcctcgccggaattcctcaccgtacctcgtcctccgctgcgcgccgcgagcaggagactaccgccattcaatcgaggtactaacgccatccacgtgttcgcattgttgttcagtaggtttagcgttagctaatcgcattttggacgacccttgcgcgtggaattgctcgccggcgttcatcgccgcggcgggagggcggcgccgccgtgtgagtctgcccagttggggcgataaccgtgcgccatcggatcgttggcggacgaccgagattagaccctagcataccccttcgtcgtattgaatctagcgcgttgaaagggaatcgtgtggccgagagggagtaaagggcatcgtgcgccgtggaccgcggatctgggatccaacggttgtcagcgtagcagtgtatataatcgggtccgggttaatctggacgcgtgatttctaatcggacggccgacattaagtgataccctttcgctctggcgttttgcttaagagaccctaggttcctttgaaatagaacccgccatcctcgggtgctgtgctctgagtcttaagagttttaccccgagccccctgacttttctggaaaatgaggcccagtccagagatcgtttaaattgaataaaggaaatagaaaatagatttttaataggaaaataattgctagaactttataaattcatagaaaattcatactaactccaaatcactccattctagttcctaaaattttgtaattttattctttagcacctagagcctctgttatgtcatgaaaacagtaagaaaatttatttcacacttaatcctattttaaacacataaaatctttgaaaatgcataacttaaaatctataactccaaaaattatggttcctgttcctggaattttattttaatgtgtagattattactgagcattttatttttatgtttggtgtaatgttaatttctctatatacactgtgcttgtttgtattgtggcgagtagaagagcccgttgctgaggattctggtgagcagcaggtcgaagtagctgagcaggagctcattgaaggcaagttgtgcccttgaccactttttacccaataatgttctttaatatcactcatccatgcataggttaattttgatgggacccaataggtcaccctagattgtttatctcattaccttgtttacccctgaatcacctgggtagtttactattgctttacatggttttgggataatcatttattatacctatgttccaattattcttgttattctgtttatgttcatgtcaagttcattaatgttaattggaacatagagcttaacttgagaaccacgtgccaccacaagggtttaatgggacgcccttggctgactaattaggaaagctagtggaagacgaccttacccgaaaggggcaagggcagtaggggagtggtcagtgtagggaggtccctggttgattttgctgcgatggcgatcagccaggaaccctgcattggaacttcctgtaaactgtagcgggttttcggaagctagtggaactttgtaaaggcctcgtagtggatccctagccattcacctcggtagtgtctaagggcctagctaaccctggcgacatgggaaacacgacttgtgggtaaagggtacaacctctgcagagtgtaaaactggtatactagccgagctcacgattatgagcagctcaggactctctgatgtttaaattatggaacttaaattcaattttgtcatttgcattgcatgggtttgttataaattgtgttctattactttacttatggtttggtatttacttacacttagtaactgctaataaaattttgaccaactacttaaaagcaatgctcagctttaacccctttcattgattagccttacacatcacatgaactcacacctttgtgagtttatgtccactggttccccacaacttgttgagctatgatcatgtgtgagctcacccttgctgtctcacacccccccacaggagatgatcaggtggttcaggaggagccgcctaacactgaggagttcgatctgatctaggtggcgtttcccagtcaacattggtgccgacgatccttagttcgttttatggttatacttttattttgtaataagtcttccgctatgtaataattactctgatgttttgtgacattcatctctatacactctgttattatatatgttgtcttctgggcgcatgtatgagatgcacctggccttgttccttaaagccgggtgtgacacaggttaaattataaataaatgaaagtatttaaaaacatggacaaggaaagaaggtaaaggaaaaggaagattacatggaccagctatctaaccaaagtagaatagtatcctagaaacgaattttggtactacagatgagcagggacatttttttcctaaacgccttgacacaacaaaatctgaatcatgatattattggccctaatttacacatacctatcttgtgtcaaaaatattgcacacatagatgtggaactcctaatggaatctgtgccatgcattacccatttgaccaagaacgaacgaaaaccagaaatctgagtacatatagaaggcattattttgtagttcttcaaaattctctttgttgaacctttgaaaggctcttgcaattatagaccaatgtatatgtgaacctttgaaaggcttttttcttgttgaaatctgcatcaagcaggtcaagccgtgaaatgacctatattgattatgctccagatcgacctgaaaatggagcaaaaagattacatagagcaaaaaattacataagctattctattgtgtgtgatatagcctagaacgtaacataaaagggcgtaaaagtcttctataatatgaagaaacaaaacataggaggtatcttgtttatataacaaccaaagttgcactgtgttgttcatctcaaacaattacaaaagtaatctagactaagaacttttcgacagtgctagtataaagactgtcaagtccaatgcacattccacaaccactaacatatagcagtaactatagccacatgtaactaaaacatttttctgagaattgttgtgatatgtgtgcatgatatgctagcagggacaaaaaaattgcagggaaggcatgctgacagttctttctgttaaaaaatgtatgcaccacaggaataaatacttgacagacgaacttcaatattcaattatcaacatgagagccatgtaagtatcatagattcatttgataaaaggaaaacattagttacaaatgcttacaacaaattcagttgtactcttcaactttttagctaattctggtaagcctttgtgatcttgaagaaccagcgtaaatagtgtgtcctctaaattagctggcttctctggttaacataaatgttgtatcctttaaattagcaggcaattttttatgtcggggacatctctgtcaatgaactgttcaacaagcagtttttcctgcaacaaaaaataagctaaaacccatgacactgaccaaaatatataaaagataaacatagaattagagcagtcctatgtttttaaaaagaaaaacactgcactgattttatttttgcatggtagtatggtacatgtcattatgcatgaggagactaccttcagctttgaaaataccaacgtgcatacaaattctctcatatcaacatgcctatgattaactattgtttgtgtaggaaacgggtgacgcctaagagggggggtgaattaggacttctaaaacttttactaaactaggccacaattaaatccctagagcaaaacctatgcaaataatcaaactataaagtgcaatctaggttttatctaagtgttgctatctctaccgcaatggctaagtttcaatctacactaaataagtatgtatacaagattgaaacttaaatgcttaatataaatgcggaaacttaaagagcaaagtagagaagcaaactctcgtggataacgccggtatttttactgaggtatccggaaccacgcaaggtcccgactaatcctcgttggtgcccctacgcaaagggaagcccacgcgagggccaagcaccacggtcgagtaactccgtagtgagccgcgggccttctccacgtgcaagtggtgctccgcttccggctcctcttggacgctccccgccgtctccactatcgagctttcggccgaaacgccgcaggcctcgttcccttcggtacacggtggccgccgtgacacaaacgcggttgtcacagtctcgcaagactctcgccccactcggtacaattacaacggctcacgcaagagctgaggggttgtgtggttttacaaaactcactcaactaattagggttcacctagagcaagcgctaaagcggtctaactaacctaagcacttcgcaatgcacctacgctaatcaccaagtgattctattaagcacttgggtgtttgagctcttggaaatgtgcaatatatgccttggtatgttgcttgggctcccacaccttcaaatggccagttgggtgaagtatatataggccccaactccaaaatagccgttggagaaaagctgttgttctctgcggcacaccggatagtccggtggtgcaccggacatcgcattgtagcctgtccggtgcgcctagccgttgtcctatcagagcaggtgatcgttggcgccgcaggcttttcacaccggacagttcggtgctcacaccggacagtccggtggtcttctctccgggtgccacctggaactagccgttgggctgcagttctctggtgcaccggacagtccgatggtgggcaccggacagtccggtgctccacgcacagacagtccgcaggcagcacacttggacttttcttggatctttttaatgtcttcttttgaggtgttgctttccccaattccttagtccaagtggatcttgcatcctgtgaactacaaacacaaacactagatagcttattagttcacggattgtgttgatcatcaaacaccaaaactcaattagccaaatggcccggggtccattttccttacaatctccccctttttggtgattgatgacaacacaaccaaagcaagcaaataatacaagtatttgaatgtaaatatgcaatctacttgctaggatgcatgtttgtcccccacaatgtgatattatggacttaagcctccccctaactccataattcacttacttcctattttagaccaaagaaccaaaaccacttgaaaaaccacttgaagaaataaaattttaaagtggtggtgtttggtgtttgatacattttatattgctttggtccctacaacttctccccctttggcatcaaccaccgaaaaggaagacattaagagcatataggaagcgaataagacttgccctctctaaagaattataaattaatatcaatagaagcactaaaagattactccccctaaatgagtgttctcctttagaaagaattttctccccctttagagatgaagaaaaactccccctgtcagagatcttctacttaggaaaaagcatgtgaaaattagaggtacaagacatgatttgaaaagactaacttcccttatgcataggtaacagaatgtgagtgaaccacttatgcatttttagcaacatggaagtatatgatatgaaatatagtctaatcaaatattggagaagacatgtaaatgatacaaatgttgtctcacaattaccaattgaaaccaatggcagaccatttgaagttaaatggtagacttgtaagacgtaagagttctagtggatttgcagtggaagattgttgtctttctccggggacctcattttccttacaatgagactatcacataaaatagacttgaaaaggtgttagtctcaaagtattatattatagagtaacctccccctgaaggtgtgcatacaagttttgaatacttgtaggagacatgcactttgatttgatatcaagaggggcgaagtatttataatccaaattttggcacatataaattaaatgatacacattgtaggatgtgagtgctttaccacttgtaatattaacaatatcagttgatgcatcatttattatagggtgataaaggagctatgtgccatactcaaatgaacattttaaatcatgtaggcttgcttaagtgtatgaatttaaaacaagcatacctaccatgtgattttcctagtatgcatgcatttaagctaaagtaagcacaaaatgtaatactaggcatgaaaggtaaaactagatacaaaaaagataaatactcatatctaaaaataagaaatacagtaaatctagttaccttagtcatgggtggaaaatttgggtccaagattttcactaactcacttggcaataaacttgatccaatatgatgtatcccatgatatacatcccaattttgccaagtctccaaatttcccgctaccttcggtccacttacttccctttcgggatccaaaccttcttggtgcttttcatggttgaaattatttcctttggcacctagatgcgtttggcccccttgcctttgttggcttgcttgttggccttgattgctatcacctttccattctttttcttcttgatcaaatatggcgtagcaatctttttgtccacctttttgatgtaggtgttgaagattttgcttgatggcttttgcttgagcttttgcttctgcttatccccggtcatcgccttgcattgaaaagacttatggccttccatatggcataccctacaaatcacaatttctccctccataggcttgttcactcccgcaatggtgttatcctgtggaggtcagatttgtttggctttgcctttcttgtcatacaaagccttgccaagacgagctacttcttgctttaattgctcattttcctttgcaacctcatccgaacatgtctccacaacaatattctcaacaaagacttggttgcacgggttagaatcatcaattaaattaaggcaggaagtagaagcatctttcttaattattttaggtatttcaactaaagatgctgctagggtgctaccaatgttttctagcttagtagttagctcattaatgtgtatgctaagaatttccattttctctagcaaattttcaatagcttcttgggagctagctaacttagctttaagtttttcattctttttcataaggccatcatcggtagcagtggatggagcactagattctaatagctcaattttagttgatagctcactatttaagtttgcaaaagttttaaatttttctagcaaacctctataatcattttgagagctaatcaacttatttttcaaagttttaagttgagctttttttagtgcaaacatcctggaaaaattcaacggcttccgcaagctcatctatggagggctttccctcaccttcatcatcactactacttttatcactagaagatggaatgcttttgttacctcttgccataaggcatttgtgtgatgaccgtgatgagcgtgatgaggatcggtggctgcgtgttcttggaggttcatcttcgcttgaagaatcatcccaagttttgacacttgttagcgccttgcctttgctcctcccctttttgggttcggccatatttggacaattgtacctgaagtggcccttctccccgcatgcgaagcatcctctctttctttgctttttcctgtcaatgttaaagagaagatcctctacctgcagaggtacacccattagattaattttgcggatcatccccattacctttccgacgcgtcggattgtctctttgtcctcggaggatgatgtgcatggttgattatcttcatcatcatcactttcttcctcttcctcttcttcacttgaggaacttggagtgggagccttctttttgcccatcctttcatcacatgaaaaagcatatggccttgaggaagttggctcctctccccgacacatttttcgcgacatctcaaaagccgcgatttttccaatcacaatggttggggtcatgttacccaagtcctccatgttgtgaaggatagtgatgatgctcccatatcttcgttgtggtagtagggagataatcttcctcacaatgttcgcatcatctagcttattaatgccaatagaattgagctcattgataattagattcaaacgagaatacatgtctctaacaagctcatcatctttcatagcaaaagaattatactcatttaagactaggcaatgtttttgctcacggacattggatgtgccgtcatggagctcatgcaattttagccaaatctcattagtagttttcaaggtaaatacttgattaaaaatatccatgctaagagattcatacaagcaatttttggctctagcatttaaatgaatttctttttcctcactcgtggtgggtttctcgagattcttaaggggtttcatcctgtcacgagtgactctccaaacacctagatcaacggcctctacgtaacaagccattctagcactataatatgggaagttagtgccgtcgaagtgtggtggcctatgggtatccatcccttcctctaaaaagcgtcggctcttttagcggtgaagctaaagcgtttcaaatgagccaaaccgggctctgatgccacttgtaggaaacgggtgatgcctaagaggtagggtgaattaggacttctaaaacttttactaaactaggccacaattaaatccctagagcaaaacctatgcaaataatcaaactataaagtgcaatctaggttttgtctaagtgttgctatctctaccacaatggctaagtttcaatctacactaaataagtatgtatacaagattgaaacttaaaatgcttaatataaatgcggaaacttaaagagcaaagtagagaagcaaactctcgtggataacaccggtatttttaccgaggtatccagaaccacgcaaggtcacgactaatcctcgttggtgcccctacacaaaagggaagcccacgcgagggccaagcaccacggtcgagtaactccgtagagagccgcgggccttctccacgcacaagtggtgctccgcttccggctcctctcggacgctccctgccgtctccactatcgagcttccggccaaaacgtcgcgggccttgttcccttcagtacacggtggcggccgtgacacaaacgcggttggtctcgcaagactcccgccccactcggtacaattacaacggctcacgcaagagccaaggggttgtgtggttttacaaaactcactcaactaactagggttcacctagagcaagtgctaaagcggtctaactaacctaagcacttcgcaaagcacctacgctaatcaccgagtgattctattaagcacttgggtgtttaagctcttggaaatatgcactatatgccttggtatgttgcttgggctcccagaccttcaaatggccggttgggtgaagtatatataggccccaactccaaaatagccgttggagaaaagctgttgttctctgcggcacaccaggcagtccggtggtgcaccggacaatgcactatagcctgtccggtgcgccttgccgttgccctgtcagagcaggtgaccgttggcgccgcaggcttttcacaccggacagtccgatgctcacaccagacagtccggtggtcttctctccgggtgccacctggaactagtcgttgggctgcagttccctggtgcaccggacagtccggtggtgggcaccagacagtcaggtgtgccaccggacagtccgatgctccacgcacagatagtccgcaggttttccaagtagatcttgcacttggacttttcttggatcttttcttggatctttttaatgtcttcttttgaggtgttgctttccccaattccttagtccaagtagatcttgcatcctgtgaactacaaacacaaacacaaacactagaaagcttattagttcacggattgtgttgatcatcatacaccaaaactcaattagccaaatggcccggggtccattttccttacagtttgtcaaaagcaggtaatatccttgcaaaaatatgtttcacattttctctttcatttatacacatgatcacatgccatcataaaacattatcaatattgagatgagtaagatcctatgcttgattattcatctcaaattaaaggctattttcgcatttctaggtacaatagctttaggacagagggtgagataaaaaagaagagacaacagtcaacagagtagcaagtacttcatcctagaaagaatgcaattctagtacaacttcccatgggccatgggtagaaagatccagtggccagaatggctagatccagaccgctctgccttccacaaaccaacaggtgacaacggagccagaaatgcatctacctagaaaacaaaaacatgctttgaagtcaggctgaggtatcacacagacccaagaagaaaatggagaaaacacaacacaagtaacaaaaccattttttcctacatgattatcctagattatgcagccatggacagagttaacagttatctttgtagattgagcttaataacctaggtccatggtttgagacatgtggcaatatgtcattcatatataagggctaccttaacacgatatcaaatgtaatccaaaagggtatgtaattacttctgatgcaataataggatgccccatgtaccataagcaggaaaaattgtaactgaattaatgagacacttattgcaagaactaaataaaaattgtaactggtaatagaaaacaagttaagtcatgctatgaagaacttctcaaataggaatcttaaacatgtggaacaggtgctcaacacatttagcaactagttgttgatgacccataactttgcagccttcataatgcacacaattgatgcatcaattgcatacctcctgtctttgtcaacattttcaacaccttttttcttctcatcaacaggaggcgatggaatccaaaaagagtgacaacaaaaatattagtataataactaaactctaagtctaccaaacagtgaaagaatagtgaaacaggaaataccttaattcttatcattatgttaataaatttaaaattgaactaaaaaacatcattaggtgagatggatctatttgtcggttccctgttaaggatcttgtatttcacacaagaaagtgaatggagcaaacacacactacatcatctgacatgtttagttgtgttgcaatttcaaaatatctaagcctgtcggatccattgaacaatagtagtaatgtggcatgtcaaaaaatgtcaaacatgttaatatagcaccattttttgtgatgcagaaatgacccgagattacctgatatgtcataacaacgagctcaatagggttagcatcaaacttcgcacttacgttgcaggttcccatccatgtcagcttcatgtgcttcgttcttgtttgatggaactccttgaaaacatctacacatttcagtgcctcatgagactcgccatagcgagcggggtggaggatggtgacaatttcggcagcctcgccgggggcagcactgcgacgagcgaggcgggaggggtggcaatctcgtgggggaggggccaggcacgaccgtccaaccacggcgggcggagacacggtatccatgtgagatatagccacctcatctagccttatctccaagattttaaatcactgatcatcataagcgatcagatggaggccagttcacatcgaccgacaggactgatactaacaggaccatccacacttgcacatactataaagattaataagagattacataagaactaagtagtgaatcagacacccattgctgaccttgttaatcagcccatcgccaatgaaggtgctgctgatcttcttgaacaacctgtacaatgcctcgaccttgttcacgctgactgcaagaatgacaagcagaggaaacccaaccaggcaggaaaatgatgaccaacactgaatagaaaaagtaaatgaacacctccagctatcaaaattttaaagcaatgtgaagtcctcaaagaaccaggacaacactcatgattttttataactaagggaattgtttatcatcaattcattctaaaatacaagacaatcaaaagaactaagcaaagcatgagatacaaaaattcaaagcacatgtatagtgtcttggtaaaaaatttacaagatggtgaatgaattcaactcaggttgtctacttcagcattagtttgcactgtccagaaaaagaacaacagcaagattggaataatgctatggccaccagaataaaaggtcagagctgtcttttaatgctaatattgttcatgccaaacatttctttgttagcttgtgaatttatacttggacactggactgggccttgatcgacgctggcaatatcatgctgaactctgaaggcaccaaaactgttagctccttccctcgtcaatttgtcaattcaacatgtctgcttcaaaatggttatgcgtaggttgaagaaaagttgggagtttacaaaataatacaatgggatgcctgttctatcatctaacttaagccatgtatcaaggttgcaagttacataaaatacgcttatattctgatggttggaaccacacattctacacgtttcccaaaacaatgaaaaaggtagttgtcgaaagatttaagcatctaaagtgtccactctctctgagagcatcaaaataaagtagtacgtcttatgttttaaactatttattgaagtaccaaactatacggctactaaagatttatttagatgagtaaacgaaataatttatggtatataaattaagaaggggtgattagtcatgaaaaataaaatgtcacaattaccagcagcacgtgattttctaaataatttaagcatgtgcggtgctcttccagataaaacttaggggacgaccacctagttcattgaaagaggggaataaaccaagctccaactttcaagcttgtcaaggcttgtcattattaatttaaacaggacagccaattctcagacatgatgttccaaactgctaatgaatatataatgctcaaaataaacaactaggttcttaactgtcaattacacccacaagatgcacataattagaaaaggtaaaagagaaggcaaatggaataccaggaattatatgactactaaatcatttatttagataagtagatgaaataatttatggtacataatataagaacgggtgattagttatgagaaataaaaggtcaccattaccagcagcatgtgttgttctaaataatttaagcctgtgtggtattctttgagataaaacataggagacgaccacctaattcattggaagaggggaacagacgaagctccaaccttcgagcttgtcaaggcttggcattattaatttaaacaggacagacaatgctcaatctgaactgccattgtatctacaatactcaaaataaacaactagattctgaacaaccagattatttgtactcattccatgtctcataaacaaggaaaaaataacaaccagattatttgtactcattccatgtctcataaactttgggcaccatccatccaacacatccaatctaaacacaccaaacgatggggaatggaaagagcagtattcgattcaacaatggcaaacaaatatcactgaattagaccaagaataaacctaattagacaacgacctcccaaccatcattcgtcaggctgtaaagaagataaagctgccatggggcatggatcaagcagaacaccagagatgaatccaaacacacagaaaatcacgcgcgctgtctacaatgacaacaagccccacatttcattgcagtacactgggctacaaaggcacgtacaacaaagagctagggaaacattgcggagggcacgagagagcagctaacttgacaatatagcagactgagcttgcactgttagcaggcgaggaagggaatcatggggacggagaatggggtccatgcccgcgaaggagaaggcggacgccgccacggtggcaccggcgcacgcgcacacagggaacccgcacaggcagccatggatgctgcctcgccattgcgccggtcgtctctgccacgctcctctctctctcccgctgcatcgccgtggatggggcaagcagagagcagggactgcgacgatctgggcggaggactcgccttggagagcgcggacgcagacgggattctagggagagagcgaagacggggcgcgcgcggcgctcgcgcggcgtggtggcggcgagattagcgggggtggggggagggcggagccgtggtgagggtgtggacgccctccttaccctcttaagtagtagtagagatataatccgttccaaaatatccatccgttcaatttatatttcgtttgatctttttaccctaaatttgattgactcatcttattaaaaaagttcataactattattaatctttattgagatatcatttagcatataatatactttaagtgtggttttagattttttttaaaaaaaaaaattcgcaaaaattaaatgaaacgacccaatcaaacttgaaaagtaaaactaattataaatttgaacggaaggagtaagaggatgtttgaatgtactagagctaatagttggttgctttaaaatttgctagtagaattagctagctaataaatatctagataactattagctaatttgctaaaacagctaatagttgaactattagctagattgtttggatgtattcggctaattttaatggctaactattagctatagtacaatattcaaacacctcctaattaaaatggacaaatatctcttcttttggtcccttgcgttagatttttcatatctccttatttagtataaaagaatcatcaaaaagtggacaacccctagtggaacaccattttagtagtggttgcatgaaacctttcgcgcaccagtttctatgtgtcactctaaaaatgggacagcatgtacgtagtgcctatatatatacaagtcatctatcgttgcctcctcagttcatcactaatcacacttattgtgccctcgacgagtatctatagctagctcattaatcgattcgggggtgtgttgtcgaaggcggcaatggcgagctactcgtcgcggcgtccatgcaatacctgtagcacgaaggcgatggccgggagcgtggtcggcgagcccgtcgtgctggggcagagggtgacggtgctgacggtggacggcggcggcgtccggggtctcatcccgggaaccatcctcgccttcctggaggccaggctgcaggagctggacggaccggaggcgaggctggcggactacttcgactacatcgccggaaccagcaccggcggtctcatcaccgccatgctcaccgcgcccggcaaggacaagcggcctctctacgctgccaaggacatcaaccacttttacatgcagaactgcccgcgcatctttcctcagaagtgagtccgatgctgccgccattgttcttgcatccatccagcatcgtacgtacgtcctctatacatctgcggatcatcatgtgcgcatgtttgtggcatgcatgcatgcatgtgagcaggagcaggcttgcggccgccatgtccgcgctgaggaagccaaagtacaacggcaagtgcatgcgcagcctgattaggagcatcctcggcgagacgagggtaagcgagacgctgaccaacgtcatcatccctgccttcgacatcaggctgctgcagcctatcatcttctctacctacgacgtacgtacgtcgtcacgaatgattcatctgtacgtcgtcgcatgcgaatggctgcctacgtacgccgtgcgctaacatactcagctctttcctatctgctgcgccaatttgcaggccaagagcacgcctctgaagaacgctctgctctcggacgtgtgcattggcacgtccgccgcgccgacctacctcccggcgcactacttccagactgaagacgccaacggcaaggagcgcgaatacaacctcatcgacggcggtgtggcggccaacaacccggtaactgactagctaactggaaaacggacgcacagactccatgtccatggcggcccacaaggtcgatgctaattgttgcttatgtatgtcgcccgattgcacatgcgtagacgatggttgcgatgacgcagatcaccaaaaagatgcttgccagcaaggacaaggccgaggagctgtacccagtgaagccgtcgaactgccgcaggttcctggtgctgtccatcgggacggggtcgacgtccgagcagggcctctacacggcgcggcagtgctcccggtggggtatctgccggtggctccgcaacaacggcatggcccccatcatcgacatcttcatggcggccagctcggacctggtggacatccacgtcgccgcgatgttccagtcgctccacagcgacggcgactacctgcgcatccaggacaactcgctccgtggcgccgcggccaccgtggacgcggcgacgccggagaacatgcggacgctcgtcgggatcggggagcggatgctggcacagagggtgtccagggtcaacgtggagacagggaggtacgaaccggtgactggcgaaggaagcaatgccgatgccctcggtgggctcgctaggcagctctccgaggagaggagaacaaggctcgcgcgccgcgtctctgccatcaacccaagaggctctagatgtgcgtcgtacgatatctaagacaagtggctttactgtcagtcacatgcttgtaaataagtagactttattttaataaaacataaaaatatatatatgttcttgaatataaaattgataaccaaattaaaattcgaaccatcacttatacataattttactttattttttataaaacgtgaacgggaaggactaccgtgaatgactatagaaccaatcatactagtataaaatatatgatgacactacgggagagacaaactttgtctggcgctaaatattttgccgagtgtgaattcacgggcactaggcaaagatcttctttgccgagtgttacgctgggcaaagtaagacactaggtaaatcagtcatttgccgagtgtccgccactaggcaaagcaaaacactggcaaatcaaaagtttacctagtgccagacactaggcaaaaaaaaaacgctcggcaaatcggaagtttccctagtgccagacactagacaaagaaaaacacttgataaactagcgtcgtcagctaacaccatccaccaaccgttaacgttgccgagtatctgacttcgacactcggcaaagaaggtctctttgcctagtgtcggtctggaacactaggcaaagaggcactttacctagtgtcgtattttgacactcagtaaaataattttttttctttctgcttccaaactttttatgatgtgttcctatagcacctagaactacatgtcaagttttggtaaaatttttgaagtttttgctatatttacttaatttattttatttaattgaatttcttttgataattcaaatttgaactcggcaaggtaagaagcgagggtagcctggaaacacactttgcctagtgttacactcggtacaggagcctcccctgcctagtgctgcactcgacaaaagattcgcctttgcctagcgctgcactcggcacaggagtcgcctttgcctagtgctgcactaggcaaagcctccgttaccgtgccttccatcgtcatggaaacttttcttcgccgagtgacgtgtggcactaggcaaagtttttgccgagtgcccgagaaatggcactcggcaaggactctttgccgatcccttcgttgccgacttctttttgccgagtgcaacactaggcaaaccatttgccgagtgtaaaagaggctttgcctagtgtctgtggcactaggcaaagaagacgagtcctgtagtgaacctagtaggccagtgcgggaccattccaaaaaatacctataaaaataaatttaatattaaattaaacatatggtccacgtaccaagatattaaactcaaaagaacaattattacaatttatcttagctaaaaggccgagaaaaagtatatgttaaaaaggagtgtgatcccatttttatagctcgctcggtcgatcgcccgtccacttttaggtaacgaggtggtaccatgtaggagtgttgcgttgcgtgcgacttcctatcatgttgggcttaggtggcttctcacgacccaatgataggcgagaagtgtggaagatgaacaaacctacttgtttcgtgcacgacgcatgtgtttgaacaacgagttagattagaaaaaaaatataatgacttttttttttgcaaaagtgaggataatgaaaaccagaaaaactggtgcttcataagagtagagatttgatggtaaatatagtagtaatgcaatggctatactacacgcgagagtccaatggcaagccggtgtgttggggcgaaggcgaagacgctacccttcgctccaggcctttgtcaactcgctgcaccaacagaggcaagatgaccggcgcggcccacccttcgtcctcttcactgcaagacgaaggcctacgacgaagtctctccatcccacgtcctcgccttacctggaggcccacgtgggattcggcccatcgtaacaggccccgcacggacaggcgtgttacgggtttgatttgtaatagcttttctgtaatgacagtttgtaaccctcccttatgggaatattctggggataatccaggtgtctgagggcataagcgtccttacatcgggacgttgggcgctcgggcacctataaatacccccgtacagtgcccttgagaggctggattaacatagcaattgccatctcgagttaaaccttgcttgcatcctttccactctcccgttggatcaacttgcccaagagagctagttccaacatttggcgcccaccgttcgtgctacgagcaaaccacccgcgatggcacccaaaagagctagttcgaaggcagccccatccgtcgacgaagcggcgaaggcagcactgctagctgagaaaaagggcaaggccctcgcagacaacacccaccaagaagctggcgaagacgaagcactcagtaagagacagcgcaacgatcaacacactctcgaaggcaccctccgcacctacagctccggaggccaaccacaagtaccacccctaggcttcgctccactagagggcgaggacacaacagaggacggcgaagtcatcggcgtctcagcagaagaacaactacagttatgggccctgcgcctcaagaaccgcaacctccaaaagcagaaagaaatcctcgaagccaagcgccaacgcgtctccgcgcaagccaaagtgcgttagatgatacgagacgaggagcagagggcccgggaactagagcaagagattgcgctcatgcagagcgaaggacagcatgatctacagcatggcccacccctccagcagcgcgcgccagctagagatttattcattccccagcgcgggcccttcatcccacacgccgcagctttccaaggcatcaactaccttgatgagcgaagccccctggcgccgcaactccaagtgtcaccttggcccgccaacttcagggcagggagctaccccaagtacaatggcagcaccgacccagcacaatacatcatgagctatcaagtcgctgtcgcatcatccggaggggacgacgccacaatggccaagtccttcatcatcgccctcgaaggtccggccttgacctggtacaccaggttgcccccactgtccatcgactcctggcgaagtctccgggacaagtttctgcttaactttcaagggtaccgcccagacatcgatgccttggccaagctgtcactctacaaacaacaagagaaagaaaccctacgggagtactaccgcaagttcctggctctcaagtcgcaactgccctcggtcgacgaccaaatcgccatacactacgccatcagtggccttcgggctggcgtcctatacagtcactgcatcaggtacccacccaaaaacctccaagagctctatcagttgtttgaaaagtacgccagatccgaagagctccatcagcgcaaggtcgagtctcaaagaaagcccaaggaccctccgcagtctagccaaacatggacaagaccttcacagtcagactccggtcgggacaaccgcagtcagcagcaggtgcataacattgccaaccagcaccccgccagcgaagcccctcgccgccaagattatccccccagggccgcggcaatggcacgcgtggtcggggctggggacgggcgcaacagccgtgcagatattactgcctgttttcacggcgaagactgcacgcacccaaccaaggattgtccggaaacgaaggccaccagggacaggatgtctcgggcacaacccgccgacaacccaagagttgtcgcgcacacataccaacaccaccacccacaaccatacaaccacggccccgcccagcatctacccaaccacgcatatcaacaccaccaggagttacaagtcataccacctccacccccgcctccgcatcaaccaaacatccaccaccaaaatcaccccaagcaccaaaacaggaagacttcgctgatcagccgtatcgcggagtcattcacatgatcaccggaggggtccagcattgactttgacacgaagcgacaaaagaggaatcactaccgaagcatcaaccacgtcgccatcaccggctcggtcgtgcaaacgaagtggtcacatgtgccgctaaccttcgacgccagagatgttgatctgcgcagcgcaccccacattgatgccatggtaatcaactgcagtgtggcaggctgggacctgcacaaagtcctagttgacaacggcagccaggcggacatcatcttcctccatgccttcgaccgcatgggcatcagccacagccctctcaagccttcgaacaatcccctatatggcttcggcggcaagggcaccttccctgtgggcaagatagagctacccctatccttcggcgtagcacccaatgcgcgaagcgaataggtcacctttgacatcattgacatggtctatccctacaacgccataatgggtcggggctctatcaacaaatttgaagcggcaatccacggattatacctctgcatgaaaattccgggtccacaatgcgtaataacggtgtacgggaaccagcagactgcgcataacattgagagagatttcgttcccgatcaacggaacgtacactgccttacgacgcagcgcgaagtccccgaggctacctgcctagctgccaacaaaaatgaaaaggcacagctaaaaagcaacgacagaacgaagacagttccccttgacccggcaacgcccaagcaaacagtcatcataagcgaagacctgacttcgcaactggaggagaaactcatctcctatctctccagaaataagggcgtcttcgcctggtctgcccttgacctggtcggagtcagtcgcaccgtcatcgagcacagtctgggcatcgacccttcggtgcgcccaaagaagcagcggtttcgcaaaatatccgatgaaaaaacagaagccgccaaagccaaagtacaccgcctgttggaggccaatttcatcgagccagtcgcctaccctacgtggctatccaacgtagtcatggtgcaaaagaagagcggcaagtggtggatgtgcatcgatttcaccagcctcaacaaggtctgccccaaggataatttcccgctgccacggatcgacaagatagtcaatagtgcggccggatgcgaagtcatgtcactcctcgactgcttctctggctaccaccaaatatatatgaaggaggaagacaaggccagtaccagtttcatcacaccattcggcacatactacttcatcaggatgccggagggactcaagaacgctgggtcaaccttctctcacctcaccaagacggtgctcgagagccaagtaggccggaacattttcacgtatgtggacgacatcaacgtcgccagaaaaaataaggaggatcacctggccgacctcgcagagacatttgcaaacatgagggacgcacaacttcgcctcaaccccgagaagtgcgtctttggggtccgccaggggaagatactgggctacctggtgtcgcaccgtgggatcgaggccaacccgaccaagattcaggcaataatcaacatgacacccccgcagtcaaccagggacgtccagcgtctaacaggcagattggccgctctaaacagattcatctccaagtccgctgagcggagtctacctttcctcaagacactgcatggtgcgaaagacttcgcgtggggaccaaaataggcggcagccttcgcatcactcaagcagcacctgtcagacttggccattctcaccagtccagacccttcactgccgcttctgctctacatcgccacctcgccatatgcagtcagcgcagccctagtccaagagcaaaacagggagggcataacccggcactgtccagtctactacgtctccgaggtcctcacggcctacacagtcatcatggcatcacgcaagctgcgccattactttgaagcattcaaggtgcgggtcacctcggacagaggactgggagagctattctgcaacccgaaggcgtctgtttggattgccaaatgggcagccgagctctccggctaccatatcgtcttcgaactcaggacaacaatcaagtcgcaggtcctagcagacttcatcgttgactggacagggccagtaatgcagcaggacgagcctgcagataaagtgtggaccatccactgcgacagcgcatggtgccatgcgggggcaggcgcggctgcagtcatcacatcacccacaagggtcaaacacagatatgcacagcacgcctcagctttgctttggagtccgacagatgcaccaacaacgtagcagaatacgaagctgtcatcctgggtcttcgcaagctaagagcgcttggtgtcaccacctgcataatcaagacagattccaaagtggttgccggtcaggtcgaaaaagaatattcagcaaaataccccgcactcatgcagtatctcacggctatacgtagtcttgagagacaatttaagggttttaccttacagcatgtggatggagccaggaacaaggaggccgacgcattggccaaagtagctgccagaggcgaagccttgccctccgacgtgttctaccacgtcatcggcatgctagcgtcagcaatccagagggtctacaaataaccaacgacaccgagggccatcacatagtcaacctcatcatgaccgaagattggcgggccccaataaccctgttcctgcaaggatattatcatccaatcgacgtcaacaaggccaagtgcctcaagcaccgaagccgggacttcgcaatcattgagggccagctatacaagaagggggtcagtcaacccacgcttaaatgcgtcaccgaaaccgaaggcatccagatcctgcgcgaagtccacagcgtaacttgtggctctcactcggggcctagggccctcgctaccaaggtgatccatcgagggttctactggcccgctataatctgcatcgcgaatcgagtctcgaggtcgtgcgaagcctgccagaagttttctccccattcgggcaaccctttgcaattcacaaagctgattgcccacacatggccacttcaacgctgggggctggatattgtcgggccactacccacggctcaagggaacctcaagttcaccttcgtcgccgtcgagtattttaccaagtggatcgaggcaagggcattatctacaataacgtcgaagactgcccataaattcttctggtaaaacattgtttgccgattcgaagtcccgtctgagttcacagtcgacaatggcaaatagtttgacagccaggacttcagggatttctgcttctccatcggcaccaagcttgccttcgcctcagtatatcactcgcaatctaacggcatcatcgaacgcgccaacaacaagattttcactactatcaagaaaaggctactcgacgacagcaagggtaaatgggccgaccatctacctgaagcagtctgggcgctaaacacgaccgaatgccgggcgactggattcactccttttcgtctactatatggttcagaggccatgaccccgcaggaaataaagcacaggtcaccttgaacaagtgcatcaaccatctccgacgtagacgaaccaacgtccaaagacctcatcgacggagaccgcgtcttcgccctgcaggccctcaacaaatatcaagctcaaacgaaggcctggcgcgaccacgcagttgtcccaagagagttcaacgaaggagacctcgtactcgtccgaaccacctggacagactcacgaggcaagctggagccaaagtgggagggtccgttcatcgtcaagtcgaaggcgtcccccagcgcatacaggctaacaacaccatccggcgaggacctagaccattcttggaatattgacaatcttcgcaaattttttgtttaaatcctcagggcctacgtgcccttgtaattcaccaaatagtactattgcggcccgcactcttttcctcccgggggtgaggtttttaacgaggtggagccatgtaatatacccgcaaaaatcctccgcaaaaactcagatacagcatgtcgaaaaagaccgcatcgacggtcttcggcattcgaccactccgaagtcaccgcgagaggcagcgcagactaccctcgtgtgcgacactccgcaaaagttgcctaagggtgcagccggaatagcacaataagtgcacaaaatcgaagtcttctcctaaaagactctccgtgcaaaagtcacctaagggtgcagccggaatagcacaataagtgcgcaaaatcaaagtcttttcctaaaagactctccatgcaaaagccgcctaagggcgcagccggaatagcacaataagtgcgcaaagtcgaagccttttcctaaaagactctccgtgcaaaagtcgcctaagggtgcagccggaacaacataataagtgcgcaaaaatcgaagtcttttccaaaagactctccgtgcagaagtcgcctacgagagcagccggatcaacgaaggcacgcaacctcataatacaaattactgttacatacacacagcgagggcatcatatattacattggctcaaccttcgggatgatacccatctcactgtaattgaacaacattatcctcaattcctcaccctcaaaaagatttcacagctccccttcacctatgctcgccacaatcgacgaggacaacagttctcgcttaccagtctggtccacgcgaagacggccacgctccatcccaatacgatgacgcctaccactttgcgacaattcactcactctctgtttcgccaccgcccttcgccgcctatacctagtattcacacccgggagaccaccagaaccttccacgcgcggcgaaggctctgctacatccacatctaatgctgcaaaataatccaagccttcatccgaagctcctctgtccacgaaatcgaacccccagaatcatcagactcaaaacactcaaacatagagccacacgaatcatcatcagcaggcactacagttgaggccgccacaaaaatagtattgtcagtagcggttgcgtgcgcaggcccaaacgtcggaacctgcgcagcaaccgaggttcaatatctcacagacaaaatttacatttaaactccccaacacctattcagccacctgcgaaggcccagccacggctgcagggtcttcagtagccggttcgaccaccatcttcaaggtgtcctcgcccgtcggcgcgggggctggcgcggggtctttgccatctccagtcgtcgcggggttcgacgaggggcccttacccgcatcagacggtagcgccagctccatccctgaggcctccggcagcgagatgtcgggcagcgtgttgtctagatcgctaaggtccttaacctcttcggcatgcgccatttgcaacaatagcacacattcagcaaaactacgcatactcacacacataaccacacaaatgaaccattacctgatcaattgcccggtcgaacctctcccggaccgtctctcggtcgtgcgggccccacatcctatcgaagagtgcccccgccgactacttcagcaccgtgtcctcgacctggaagattttgtgttcgaagtttttgtccgattggtcgaagacctcaaaatgcccgcacccctcgcgggacaaagcatttacggccccctcgcaggtgacgagggaggcaaaggacatgtggcccgtcgcgatcgtcgggagcacccccaactcctcctgcaaccattcgaggaagcggaggcccgcctcttggctgcgcgcttcgaaggcggcggtccgcgcacccagttcccggtacgcgtccacgaactgcgcatgcgtccgctcgacctccacgcgcgtcgaggcctcggctttgtccacgcggttgcgcagtttgttgaacctcgcctccagctccttggcacgttagcaggcgagactgccctccgcccgtgcaagcatagcatcggcttgcgcagcctgcgtatcagcaacgaccttgttcgcctccctcctctcctccaccagctggcaccggagatccgccttctcagcctccatagcggccaacctcttcgtcagcctgtggtttttactttccgcagccgacttctcccgaacagcatctgcatgctgcgcacggagacgctcgacttcggcagcaaactccgcagtcagagcacccgacgcgacatggtcggcgaagtcggccgcctgccaccaaaaaccatgagactcgccacctcataaaaacaacgaactatcgaagtccaacatgacttacatgcttcagctgctgtgacaactgctgcgacgcttgcctcagttgtcgggacatggagcccaccacgtccttagcgatggtggccgatggaatcgcgccgctcgcgcggaaggcggaccacgggtcctgcgaagcacccttcgcaccaaccgccgccgtcggcaaagtagccaccactggagtcgggacaacagccagttgcccctcatccaaccctgcaccatgatcttggttaagacatagtcaaaaaaacttaccaacaagataatcccccacgcagatatctgtgtcgaagtcggcaacacgtgccgccgcctcgtcagtacgcgacggcgagggcaaccttcgccccttcgccagctcgcccaagggtggcttgcccgcgccagaagcagtagccttcacacctgccaaagacttcctgggcccaggggcggcaggcttcgcagttggcgctagcttgctgctgccggcagcgacagacttcgccccccccccccccccgcgccttcttcgcctcgcggaaaggatccccgatcctaacgaccgcccgacgcttctgcgcagcgtcttgatgatccttctccatcactgccgatacaacagcagcaatattctgtccgtaaggaaaaatcttcaagtcatgagccatacgagacgtaaacatgtcttcgccagccgcgcgggggatcgaaacattctttggccatcaacccccggtaaccctcagcattcgcgccgaagactctcggagctcaggcgaagacatccttcccccgagggtcgcgcacgtccccatcaactccacaacaaaactatcagagaccccaagtccccccactgcagtacctattttcctcttcttagtgcctggggcagcctcctacgaagggccttcctaagtcacggccattggtttcttcccatggcggtcgacggccacggcagcgtcgtccccgggataggcatcatacgacaaacgattcaactcgaagaccctattcaggcggacgttggatccacggatatcccaactccgcagagcctcagccctcggcacataacgccccacaatccgcactgccccgtcttccacttcatgcacgaatgcagctggatcccggccacacagatccaacgcgaaagccggacttcgcactagcttctcgcccagggagggcatacttcgcccaatgcccagccatgcgccaagggccacactccataaccgatgaattcctcaactaaatcgcgcccgctactcttgcaggcagcacaacgaagggcctcttcgtcactatcatcctccgccacctcaaacggcgggaacgccacatagcagtgggagcacaacacgaccgccgggagtcctgggaggtcttcgacctcgcctaccgctacataaaaccaataatcataccagttgccccacttgttgcgggcgcagggaactagctcaacaacttccgccgaagtcttcccagtcctcggtgtaaaggtgcatgacccaaactgtgcaatcttgcttccaatttttctcttctgccagtgcaaacaataattcttggtgaagacctctacggagggctgaccgccatacgaagtcactgcccagacatatttcgccagggccaccatggcattaggtgtcaattgatggatctgcacgtcatacctccgcaacacttccaccacaaaatgatgcgcaggcaaccgaaggtcggcagtgaaaaatgcctcgaacacaaccatctcacccttcggctcaggaatctcttccgcccctagaactcggccaactccgttcccaaaataccccaactgctgcatgtcttgcacgtgaaccgaggagatccttgaaacaccgaattcaaccgtgtggcccgggtgtagctccactgccgccaaatcactaaaggtaccctcggacgacgattcacccaacggtgtattcgcagcggatgaagaagaagacggcatggctacgtaccgtcggcggcggcgcacggtctgcttaacgcgggccagttctccgatgaacaggagcaaggaaggcaggcgagcgggcgaccggtttcaaaatgctagggttttgcagcacacagaaaggtaagagagcctgagccgcgccgcccccccccccccttttatacatagggtgcgacgcttcgggaagcccgcagtccaacagtaccgtgtccgtcaacggtcacatcaaaaacccccgcggaaccacttcgagcaagggcagcgtctccaccatctagcgacgtcttcgacaccagatgactcagtcgaactggtccctcggagggcaaatgttggggcgaaggcgaagacgctacccttcgctccaggccttcatcaactcgctgcaccaacggaggcaagatgaccggcgcggcccacccttcgtcctcttcactgcaagacgaaggcctacgacaaagtctctccatcccatgcccttgccctacctggaggcccacgtgggattcaacccatcgtaacaggccccgcacggacaggcgtgttacgggcctgatttgtaatagcttttctgtaatgacagtttgtaaccctcccttatgggaatattctgaggataatctaggtgtctgagggcataagcgtccttacatcgggacgttgggcgctcgggcacctataaatacccccgtacagtgcccttgagaggctggattaacagagcaattgccatctagagttaaaccttgcttgcatcctttccactctcccgttggatcaactttgcccaggagagctagttccaacactgtgtaatgaaacatatccataaaaataaatttaaaattaaagtggacccttcccataaagaatgaatttaaaagtaccaagctagtgtgatgaacccatcaaaaaataattttaaaattaaagtggacactttcctaaaaaataaattaaaagttaaagtggacgtatgacccatatactagatattaaattgcagttctgcactttatctttgcgaaaatgctaagaatgatgagttgaaatggagacatgcctcttttttaatagctacctcggtcggttatcctcctacatctagcgatgtggtattatcgagaagcgttcactgtatgtggcttgtgtcttgttgtgtttgagtattttctcacgaccatctaagcggtaacgacccacggatcaaattagaaagaaatataataacttcttttttacacaagggacgacacgacattgaaaactaggcaaactgacataggagaaagagataattaaaaccttaattttaggcttgaataaaatctactagaaaaaacataaaacgcttccaggatatacatggttttggggagaataaactagttctagcaaatctttttttctagtgtgttccaactagcccgttaaggcgttaaccaccctaaaaagtttagcaatctagagtcaatctcgttaactactataaattaatctaagaagataaagatcatataaattacacacaagaaaaagtaatagatatgtgtagttgtttcgatctagcaccaatgagtaaatttgtgtatgtgcgttttaggcatggattgtgtgctgaggggacacaagagttatactggtagggacagaacgtccttactttcagtatttgtttgcttgtgctaccggcacatgattgctcgtagtagggttgcaagcgactgagagagggaaggatcccaagtctctatgagtcgtttgtctaaggtatgacctgatcgttagaggctctaagttgcttgtctgtttgttcactgtctatgagccaggggtttttggttgttctcctcaccccctctactagaggttgatcctattccatttataggccaagggaagggtggcttatagatatcttctctcagaagggagcataatgttagggtaaaagaaacggtttcacccctagttaaagtcttgtcgtgtgccgatatctcttcccgtgcggtcgcctatagtgcctctgaatttgccgaggagcttgtgatccgtgttggtgaaggaagctcgtgcgtcaccattatttgtcctcttctccccacacccaccttctgccttcgtggcccgaccgccgaccttctttgtcgttgagtgagctcgtaggacgtcgggggactcagacctagagtccataggtcatgagtggggctcggcctcaggtttggtaggacgtcggggggatcagacctagcatccataggtctcgagtgggcgtagaccaaagattcgtacgctacgagtgggaggaagaccgacctgcacccacactgtgtcctgctgcttggcgtaattaatgtggcatgtacgaggtgcacggcgagagcaatcgagcaatccaacaggcgtgtggcgcccgcttggatggtcccccgattgatccgcctaacccctcgctctagcctctgcctcgcctgacccctggttcgatgcatagggatcgttccgcagtgaggcggtttttaggcatacgagcttattgttgtcttcctactaaaatgtgggaccctggggcctagggatttgatctccgatagtgtcccttgagtcactacggggagcgtgtctccctttagggatgatttggtgacaagggggtcacatggggattggaggggattgaggtcatttccccctcagtcccctccaatcctctcgtgatccttagggttgagcggtgaccgttccatttttctcttgtttcttgatttttatgcttggggagcaaggattctctaggggtgctgctggttcttggcccccttctctccggggttaagattaaccctcatctaggtggtacaggccattagggcttttgagccaaaacgtcacgggctagggtgtttgcgtactatgccgtgacacttggctaattctttagtagtcagaccatcaggtggccagtgaacgttattttcttcagattgctagcccttggtttgctttgacaaccctttcttctcccccctttttgtgtgctcatcaatgcttgagttagatgctcctatcctttgcgactgtgtggaccacgttgcgtatcgttcgtccgagcccatgcatggcgacggttgggaggagcgtctcctcaacgttctgattgagattcgcagcactatacaacatgacgtccaccatggcatggcatgtctgttattgctctagccatcaatcttctagtcagccatgagctatgcaacatcatcggccttgcaaaaacatgtagggagacaaccttagagatttggaggacgacatcgatcgatgttgcagctgacacggtggtcgaccttcttccgtctgaggaattatccttgaccctttaggttgttgtggatgcgtactatttggataggggcggtttctagccttcattgtcgtcatcccatccactgtctgtctggactactccatgtgcgtgagtcaagctcctcctttggtcaacatctcatccttgaggaattaggagagataggcacgagacttctccgtggcgccattgcgatcatggcctctttttagagatcatagtaattctttgccccatataattttattcgtgtatggaccgactctcttcctatagatagtcacctataggtggtggaataggtggcatctgaaaaaaatcacaacttaaaacaaaaacttgatccaatcacgtaacagtgtaaaaactatgttaaaatagagtgagaaggtagatagaagttatttcacttgattgctctcacaagatagtgaaataaacttttcgcaatactgcaagtgaactaaagaacttagagaatgagagaaagagtaaaatcgcaaagcaaataaatgcacaagacagacaagtgattttatctcgtggttcggacaagcctgaaatgcttgcctacatccatgttatggtgtcacaatggacatgggttgcactcaaccactctcaagcgatcatacaatcaacttgattgccacggtcttccttatcacaatatcaatcccctcaatgaatctcaacaagttggagtctcttgtagttgtacatagtttaatggagttacaattcagtaacagtaagagggagagaaaaacacacacaagagcaaacacgcagtaacacaagagcaaacacgaaggtcacaacacaacgttctcatagaatgacataaacggctcagaacaatgcccggatctctccagaatatcacgatcgcgttgtggcaaagtatgggactgatgtattgctcttggggtgcttgagttgtgaaggagtgtgccatggggtcccttttatagccccaaggccgacccctagccatggctccttccatgtaaaagttgctgaaaatcagctctacttgggggcaccagaccaagtacagtgctcatcctccgagatcctgattagctccttccttcctaggagtgcaccagatcaggtccatgcaccttcggagtgccatgtgtcgcctcccagtgaagtagccgttggcacctagagcaagtcgttacaaggtggttcgacgatttataaaaaaatcgagacttcactgttcatccatacaagtggtctggtgcacacgaattcggtccggtgcaccaggccacaaaaagctcaagtctgtgcacttcacagactcggttcagtgcaccacctgaccgatccgctaaggcccagagcagcccaagttaggctcttttgagcctaacaccttccatttgatttgtcctttcttgtgagcttccctacaacttagacaaacatagttagtacataatccaattgactaaatggggaaactcacctcttacatagattttcaatagagttcctgttttagcccaaaccaagtccaaaacgcactttttgcaacaaaaggatttagagaccaaatgcaagtgatagaaacattgaaatagacatatgcaacttatctaagtgttcaaaccttacagttttgacattttaccgcaagttttatattctggcctcgttttagctcaaatggacttagattttctaatttgcatagaagagaatctgtgctcatagacttagcaacttagtccataattttgtgttggacatttaatcaccaaaacagtagaaatggctaagttgcacatttccctttcacttgctttctccgcctttcagatcctcccctcttagggcccaaccctttttgtaagtgcatgatgagcgctcgagtccactgttcaccaaggcaaattcgtcttgggagcaccccgtatttttcgaaatatacttcccacgtgccctatttgctgaaacagggaagggtgagcagtactatgcttctcttggaggtcgagttcatgctttttggtgagttgtaaatgggtaatccgagtgagtccatggttcctttcaagggagccaagcatggggttagctggtgaccgacctcatgctcccaagcacgaactaatatagttaccaaccccgttcaatcagggccagcggcttgctgcttctcttcgcaataaaccatgtgagtcagacatttcctaggactcgaacacgagttggaagcacccttggtgctcatgcgctagcatcctggccgctaggtgtgcccaccttcggccgcctcttacactattgttttgggaatggtcgtgagctctagtgggccaaccttcgaactctaattacttagggagacccacctatgtcacacccggttttagaaggcaaaccgaatgcgaaccatgtacgtgccaggatcagcaattcacgtacacaacagttacataactggacatcatcacacagtgctcaaataataacataaaaggggaataatagtcgattacatcatatgtctgagacatccacatagtatttacattaatcaaagtgtggaaaagaaatgtagatacacgcggccttcacaggcagccaactgggggttgccgctaaccacgcctagaactcgtcgtaatcttggaactcctggaagtctccttccacggcttcatcttctcctgagcagtggttgcaatgcggacaacctggggaggggggttggtgtgtagaggaagggtgagtacacatcaacatactcagtaagtgtcctttttggctgtattggactagctttatgtgggggtaagtcaagcagttgcttttaattggtcagaatattattactagtggagaaagccaagttttagaattaactcacgttattaacccaaacataccctttccagacggaaagaataccacttaccattaccataatcaataccaaaaaccatcattctcattgccacctgtaatccgaacatctctgctcaagtaccactaatcattggagctcccttggccgctcataaccgcgagcacagctgatatatcagtttcataacactctgcagaggttgcacactttacccacaagccgtgattccctcttgcctcgggccgatcaaacccttaaacactaccaaggtgaataggcagggtctcactacgtagcctttacaaagattccctgaggctgtagccgcccgttaggtttcctaaatgtaccgcactcctccccaaggggcaaaccaaccttggcagagcgagccgcatacaccgagccccattggcggcacgacagtgaagcgaactacacctcagttcctctaattattcagctaagggcgtcccattccgccctcatggttgcactgtttttccgggcggtcatccaacgagcaggtccttacggagagacactcgataaacagctcgagcccccttaaatatcatagtaccatcatcataatcaaaagggaaaacagcgtatcatagataatctcatcatgttcattgattaatgtgaagcactagcataaagctaaactataataacccaaccaaaattggtagacaaggacaagataaacaaaagctagtcaatccttagatataaaatgtgtaaatgcggggagtgagttataagaatgagtaggacatagatgggtcaagagacacttgcctccaccaaccagctgctgctcaggggcttcccctatgagtttctcgggctcttcaaccagatcgttctctatacgagttcaaacatacattccacacatttaataccaaaagaacagtacactatacaatggaatacaataaataaacagacgttcaacgtggggctcgcaattacggttaagagagaaagaggaaataacagtcgggtctacggtcaagaggcgatcactttaaataattataaattaaaccattcgtttaaacagaagggtaccaaattagacactgcgtttagcataaagtaaagtcatgttccacatttagtcactataaataggtaaagatgaatgaaagggattggtcgtacggcgagacgtacgacacatcatttaaattgaattaagaaataaatggcttgccacacgacagagcgtgtaacaagattcttgcattaattaaagacaaacgttaagcgttgcgcgatgaaacgcacgacggcttacgccaacagaactgcaataaatataaattaaacgaatcgtcgcgtgacaaagcgcgcgacgcaacccattaataaatataaatttaaaaggaccgtcgcgcgacgaagcacatttataaagatgaaattagaatgaaccgtcgcatggcgaagcgcgcgacgcagcacattgactaaacaattctaaaatggattaaacgagggttaaacgaaacgcgactacggtcgcacgcgcgagagcacgctgcgcgtgccgggggcacgcgaaccgtgcaagccgcgcgaggcgtgaggctgccggggctcgggctcgggcaggggcacgcgagaacgcagccgagggcacggccggggcgcggccgccggggcgcgggccagggtgcagccgagggcgcggccatggcgcgcgaggacgcagcagagggcacgtggccagggcatggctaggggagtggcgcgcgggaggggcatggccggtgaggggttcgtcgaggggggcgtgacgcggggaggggctcggctggggtgggactcgccgggggggggggggggcgcgacgcggggaggggctcggccggggcgggactcgccgggggggggggggccaacgcaggaggggctcgtcgtgggggccccacctcaggaagggcctcggctggggcggggcctccctcggagggatacgacgcggaaggggctcgccggggcggaactccttggggggtctgcgacttggatgcgcacgctgaaccgctctcactgcgtcgcgaccagtgaaaacgtagtgaggagtaatagaaacgagaagggaaactccctcagatccagtcgcgatttatccacctagaccaggcaagagaaggtgtagagagtactgctcggaaatcatgaacatgcatagcaagcnnnnnnnnnnnnnnnnnnnnnnnnnnnnnnnnnnnnnnnnnnnnnnnnnngggcgcgacgcagggaggggctcggccggggcggggctcgccggaggggcacgacgcgggaaggggctcggccggggcgggactcgccgggggggcgcgacgtggggatgcggcacggctgagccgccgccacggcgcgcgaccaggtgaagaagggagggggaggagggagagagagaaagggaaggggaggggaaaactcacctctagggatccaaagttcgacgatcttatctccaaaccctagggcaccacggggagagagagaggtggaagagggagagggaggttactgctcgggagaaaatcaaatgagacaatgggattagggggagggggcacacacatgggtagggcaaggggcgccaggggcatgcgggccggactgggccagaccgggccagactaggccgggctaggtcactccgcgggtcgaacaccaattggaattccgatcacgaactgaaatccgaaccgggacgagacgaacacgcgatattagacaaagaaatgcgcttcggcatgatgcaacacccatgacacataggttttgtttatacatgacacggacgccgtcattatactggattgaaattgggaagaagtagcaaaacgggaagagaaaagagagtaacgcccgaatttggtgaatgaaaagaagaaaaaattctacccccaaattcagggcgttacaaacctatcccccttaaaagaatctcgccgtcgagattcagggttggctagcaaagagctcagggtatttagccatcagatcatcttcacgcgcccaggttgcttcttcctcagagtggtgaatccatctgactttgcacattctgatagtcttcctccgggtgactctgtctgcagtctcaagaatctgtgctggcttctctatgtaggtcaatgtggcggaaccacccgaattattccagcttaagtgcctaagtcacgcctcaggggccgcaacacacttaaatcggaataacccgtcagtccctcagatctagtctgatagagccacttaaccaggatcaaattccacaatctcactcgaaggtgagtcacagaagaaatacaataaagcaggaaatctcaaattaagtgctgaattattacatagatcggagtttttcgagtagcaaataagagttcacgaagtaaaatgcagcggataatcaatgtcatcgtaatcgaggaaatgggcaaggcctagcccactactcctcgtgctcctctcctaccggagcaacatcccactcgaccgtccaacccggtggtagggtggtaggccaagtcacaccgtcaaccatctcctgaatcgcacctgcaaaaattatgccacaagcaaggctaagtatactaatacttagctagacttacccggtgtgaggaatctactcctctacctctagagtatgcagctgtttggctgaggggtttggtttgccaaaagcactagctgtttctaaaaatcaattcttagcttttcaaattctagtaatattatcttagctacatttgctccttctaagcatacatggtaacaagcatttagttcaatcaacaaattgtctcatgtaacctcatttcgcttcttactcgatgtagtacaaggggtcaggcagtctcattagctgcgagaagcagacgattcgaatcgagtttttatccttgcaaggtaaacctaaacacacgacatgtcagggcactccgtccccacacatgtcaaccgtccccatcgattccccgttcgcgtccatgcctcaccgccttggcatacaatgctccactgaccccggctgccgccgtgcagtgaccgcacttgtacccaccatagctagcatgggagacccaatctcaggtcgcatgagggataaagtccacgcccggcttcactcaggtactaggtttatcggttaccatatttcccgacatgtgcttagtacgttcaaaagcttgactcaggtatccacacattaatccttaattcctttttcccgtctcatggacaaggcatcctccctggatccaagtccttagactaacatagatctcgttatcaagatgaatacaatcaattcctgacctcgcacaagtgctagaaaaatcactcgacttctaccgagatcctgattagcaagcagctactcgacctagcatactagtatccatctcaaaaaggaatcctaagttcatgcatctagaggtttcaagcaactcctacacttaagtgcacattacaaacctacaaacattaagtgtagtaaaatagcatatataaacggttatgcataaaaccggggcttaccttcaatagctggggctgcggggagatcctcgatggcagcctcaggagcttgctcctggtcctcctcttggacagatccttgctcggggatgagcacgtactctccgtcagctagattacaatctaatgaatgcaatgcataagatatatgcatgatatgatatgtgcattagtaatttaaacttttgatggtgtatgatctacttgagttagatagagctacatcttgcttacacgagatttttgggtggtatatttggtaaattggatcaaacttagctaagttacgtggtaggtttattcttggggttccactgaattctttttaaggcctttagtgaggcttgtcaagaactcaagttggacttattggagtgagttttatttctcctttcttttctttattctctttaagtttttagagtgggtttgaactacaagtcaccttaataaatttccaaaaattctgcaaaaattacagtggcttgtcactggtgtgtaattctctgtctcaaaatttggggcccaaaaagtgaatatttttctctggacaaaattaccaaattttagggtagaaggggtgatttgaactacaactatcatttaatagtaggtaattccctaagacttatttttgctggcatttagaggctataacatgacttggtacaaatttccagccattaatacttatcagttattttactaggattttctaaagtttctagccaaaggggtgctttctactaccactatattgaaaaatacccaacaacagatttctgatttttctaaagtccggcctatccagggcacaattgatcgattgaacgggtcagagagcttcactgggtgctagggaagacatggttgcaaggaatttgagaatggcttaccggagagctcggtccacgcgcgggggcgggcgaccgaagtccggcgagggtgatctcgggcttccgatgaagttctgccgggtccgaggacttagaaagcttcacgggccaatggcgaagctaaccgaagcgctggcgcgacttggacgcgactagagagagctggccacggcggccgaggctctaaaaacttggcgggcggtggcgcggcgtgctcggggcgaattccagtgatctctgacttgggcaagacttgagagcacgcggggatgaatggccgaggcttggggcggcttcataggcacggcgcggtgcacgggcgaccgtggaccggcgagcgcgcgcgggcgtgcactaggaggcgcgggtgcgcgaacgggcgtgaaccggaggtgtcagccacggtcgaacacgtgtgcctattgcctctgcccaagttctagcgctgattgggtgcaaatcttcgcgaatttgggcaagatcgctgtgaaggatttgttcacctgaccttgctttgtctttttgtgtatggacgtcgcgcggttttaggctagggacaaggagttgtagcgtcaccaaggtgccagtgtcagaatgtctggtcccgaggtccatctgcgccaaaaccatgccaaatgaatttggtttgagttcaaacttttgcagggcgtgttcaagggaatttggcacaactttgatatttggatctcctggttttgagtttcgaaaaatagagaacgcagttgatccttggaaggaggtcagaaattcagaaatctgaatttccctaagggttcatggttcatgggctgatttgggaattttaaaaaaaacaaaaggccaaactctcttactatgatttgttagttatttgatgaactaaaactttgtaatttggtcatatctaaaatttgcattttccccccatgacttctcccaattaccctttatgcctaacttggcttacttaggttttattagggtttgagagtctttctctctcaaggttcatgacaagattaaggagagtttaagaagattcattataaacctttgctctaaattttcttttgatgttcaaccctttactaaatttacatgtgataataggttggggttagcttagggaagaaccctaggtgacattggggtgtcttagccttccccccttaaaggaatctcatcccgagattcgggtcagagtcctcctggggtgaagcgaagggtgagacttataggaagtgggtgctcttattattagggcaatttgctcttcgaatgtcattctctttgcaacttcagaaggaagtcctttttaaattttgttttatggttacttcattctgattaagatcatatttccgaattttagattcgaagggcaggaggaggggttgggtgcgattacgtaccagattccttaggtaggcaatcggggaagttggatctcaagaattcctcggtctcccaagtagcttcttcctctgagtgattactccactggaccttgtacattttgatcgatttagcccgagttgatctttctttgcaatccagaatcttggaagggtactcttggtacgatagatctggttctatctccaattctggctctgctatgatctcggttggcaatcgaacacacttctttagctgagatacatggaacacactgtgaatggcagacatttttgaaggtaacttcagcttatatgccacaggtccacaggtttctatgatctcataaggtccaatgtaacgaggggctagcttgcctttgattccaaacctctgcactcccttggtgggtgataccttgagatacacgaaatctcctaccttgaattggagaggtttccttcttttatcacggtaactcttctgcctggcctgagcagcttctagattcttcctgattagtttgacctccctttcggcttcagtcactaagtcaggtccgaaaacttctctctctctccaggctgagaccaattgagtgatgtcctgcaccttcttccatagagagcttcgaagggtgccatccttaggctggattgataactgttattataagcaaactctgccaaagagaggtgcttatcccagttcttcccacaatcgattgcacaagctctcagcatatcttctagaatttggtttaccctttccgtctgaccatcagtctgtgggtggtaagctgaactcctgattagcttggtccccaaagactcctgcaactgttcccaaaatctggcaacaaattgggctcctcggtcagaaacaatggtccgaggtaatccgtgcaaacacacgatccggtcaatgtacaactctgcatacttttgagccttatcaatggtgtgcacagggagaaaatgtgccactttcgtcagtcggtccacaatcacccaaatcgaatcatgatgacgagaggtgttgggcagacccacgatgaaattcatgctgatgtcgtcccatttccacgaaggtatggataggggttgcaaaactccagctgatttcaagtggcttgcctttattctctgacaggtgtcacattccaatatatactgagctatctccctctgcattctggtccaccaatacaaaggcttcagatcatggtacattttggtgcttcccgaatgcatagagaatttggagagatgagcctcgtccaagattttcttcttgaggtccttgtttttaggaatcaccaatctgcttttgaaccataatacaccctttttcatcttggcggaaacatttatacttctcaaccttctgatggagctgatggagattctccttgataatctgcactcccttgtcactgagctgggccatgatgatctggtcttgcaaggctggctcgacagaaatgtgagacagagcaccagaaggaatcacctcaatttgcatcttgctcaactcatcacacaaggtgttaatgcgagaatccatcagaatacaattgcattgcaacttccgactcaaggcatctgctaccacattggccttccctgggtgataatgtacctccaggtcataatccttgatcagctctagccatcttctctgcctcatgttgagatcagcctgagtaaagatgtacttaaggctcttatgatcagtgaagatgttgcagtgggttcccattaaatagtgcctccacatttttaatgcatgaaccactgctgccaactcgaggtcatgagtggggtaattttgctcatgaggcatgagtgctcttgaggcgtaagcaatgactcggttgtcttgcattaagacacaacctagtctagtgccagaggcatcacaatacacatcaaaaggcttgctgttgtcgggttgcgccaacactggtgctgtggtgagatgcttccttaatgcatggaaggcatcttcgcacttctgactccaaacaaacttggcttctttcttcagcagctcaattataggcttcgcaattcgagagaaatctggaataaatcttcggtaataacctgctaatcctagaaaactccgaatctgacagacagtcgttggtggcttccagttcatcacctcttgcaccagatcaacagctattccagcctgagagatagtgtgacccaagaatttgatttcctttagccaaaaatcacacttggacaacttggcataaaggtggtgctctcgtagacgttgaagtattacatgcaaatgcctggcatgttctccttcgttcttagagtacaccaagatatcatcgatgaacaccactacgaacttgtccaattcaggcatgaaaacagaattcatcagatacatgaaatatgctggtgcattggtcagcccgaaagacatcaccaagaattcatataacccatatctggttgagaatgtcgtcttcgtaaagttgcttgctcgtatcttgatctgatggtagccagagcgaaggtctattttggaaaacaccttggccccgaccaactggtcaaaaagaacatcaatacgaggcaaaggatacttgttcttgatagttaccacattaagagggcggtaatctatacacagcctcaagctttcatccttcttcttcacaaacagtgctggacatccccaaggcgaagtacttgggcgaataaatcccttgtccagcaactcctgcaattgcttcttcaattctgccaactcagcgggtggcattcggtaaagcctcttggaaattggtgtcgttcccggttgcaactcgatggcaaattcaatatcccggtcgggtggcattcctggcaattcatcaggaaagacatctgcgtactcacagaccactgggatcttcttcagaggtaactccatcatagagaaagcacatgactgagtagaaccctgactgggcagaattaaggtgaagttcccacagaatggagaattgatttccatgatacggctggctacatcaagcacaacttggtgcagagtcatccaattagctcccagaataatgtccacattttccaaacccaaaacaagaagggtggttttgacaatgtggcttcccagttgaataggcacactttggtttaattgattagttgaaattttacccccaggtgtgactattacaaatgacccttttgagtgagacaatggcagttcacatttagcactgaacttctggctaatgaaactatgagatgcaccagaatcaaacagaattaaagcaggttgattataaactaaaaagataccggtcatgataggagctccctcaggtacttcctctagggtagtgaagttgagcttcccttgcttgacctgtaccttctgctttcttcccttgtcttgatttggtgctggcacctgcctttgctggttcctgggacaattcttggcatagtggcccacattgccacaagtgaaacatttgttcccattgccctggcagaactgctgctgctgcggaggttgattgttccttggagtgggagctggaaagcggttgggtgccggctgctgctgctgaggtggcctgatcacccatctgcctgcctgctgctgaaaacccctgctctgattgtgagaaacaatcctgaacctctgggcctgggcggatggtgctgccattggtgcccttctcttcttctctggccggtgagctacaatgcaatcttcctgggagatggccaggttgaccaactcattgaagctatcagcccggacagtgttgagtcattcccgcagcttggtgttaagacccctgcgaaagcggtctctcttcttctcatcagaatcagcatggtaacctgcgtactggcataggtcgttgaaggcctgtgcatactgcagtaccgtgcgggttccttgattaagtgccaaaaactcattcagcttgcgatcaagaatgccagctgggatgtggtgccctctgaaagcagtcttgaattcctcccaagacacttcacgatcagcggggagcatagcacggaagtggtcccaccaagtccgagcagatccacgaagctgctgcgcggcgaagcgagtcttggtagcatcagggcagtctcccgtgaggaggggaaacttggactcaatgacgcggagccacacgtcggcgtccaatggatcctctgccttggcgaacaagggtggctgcgtgctcaggaactcctggtaggttgccgctgccggaggtcgctgaggctggcctccaccatgctgctgagggtggggctggcgctgcaagagctatcgcagaatctcattctgttgggccatcagctcctgcaatgtgggagctggaggtggtggtgggggaacctgctcattatgcccgtgatgctgcctagctgccatctgaaaacagagattgtcgccattgttatcccaacgcacaatttcgaacggcaagatattatctcatatggaaggaaaaatgccataatcataatatcaagttcgaaatgaagataacatggttacaaacatcccatagatttcaaaagttcatagggttacatcaatcaggggaaagtacccgtaagcctagtccaaaatctgacattaactaagctcgcataggtttctatccgcctaaaagcgtcgaagtgactaatcaaccctgagcggtggaagcgacactggatacgggtgaaggaggcatcacggaggtagtcccattggcaccaggggctggtcctagctcctcgggagcctcttctccctcgcttccggcttcattagcctccatctccaagtggtgcatgtccagatggtcattcgcttcttcgagttccctctacacatcgtggagctggttctctaagacatcaatagtgttgtctcggatctccacctgctgctccaaggtggtaatgcgctggctcagcctttccacctgcagatccttctccaccaactcgaaagataaatcgaccacaaaatcttcttggctatcgagagtgagcttggtggtttgagcgatgttagcaaggtgtgccgtagcatcactctgaagggcctgaaggcagtacagcgcactcatgcactgaacggtgaccctcccaaccaagtcaggatacattgcccacacatccttcacatggctcacgcggttacaccacatggggtcatccctcttctcagcagggaagagtcccaaggggtgcatcaccatctccaggggatggtagccatagaaagtcatcagagtcttcatggctgccgcctcaatggtgtcgtccgtcctgaatccaactgtttcggaatcaagagaacgccaacccggctgaaggggatgagcctccaaagtcagccagacccaacaacgaggtacccgttgctcctcatacaactgcaccgtgtacaaagggggcgtagggtaatcggcggagttaagcacttcccacaagatggaaggaaagccatcgcgagaaaggaagttagaactgaaacgggtgtctcctccactggcgggggtgggtgaattcatctgtggaagggtatcaaaggtaaagattatggtggaaggaataaaaataaaagagcctggatgggtttaaaaggaagtgggttagctcaagttttaattcccttttgtgtttataatgcatgcatgctggaagtaacgtctcctctccaaataatagggtgctcttagggcatccttaaaaatctaagtactagcccacggggcctacttaattagccacctatttctccctctatgcctagggcctttcgtcctaggtctagcggtctagtcctgacgattcttagcagtttctaggcaagttttaaaatttgaaaatgggattcatggtttattgtccttctctgtggtggaatttgctccgataccagctgtggcggaaccacctgaataattccagcttaagtgcctaagtcacgccttaggggccgcaacacacttaagtcggaataacccgtcagtccctcagatctagtctgatagagccacttaaccaggatcaaattccacaatctcactcgaaggtgagtcacagaagaaatacaatgaagcaggaaatctcaaattaagtgctgaattattacatagatcggaatttttcgagtagcaaataagagttcacgaagtaaaatgcagcggataatcgatgtcgtcgtaatcgaggaaatgggcaaggcctagcccactactcctcgtgctcctctcctgtcgaagcaacatcccactcgactgtccaacccggtggcagggtggtaggccaagtcacaccatcaaccatctcctgaatcgcacctgcaaaaattatgccataagaaaggctgagtatactaatactcagctagacttacccggtgtgaggaatctactcctccacctctagactatggagctgtttggctgaggggtttggtttgccaaaagcactagctgtttctaaaaatctattcttagcttttcaaattctagtaatattatcttagctacatttgctccttctaagcatacatggtaacaagcatttagttcaatcaacaaattgtctcatgtaacctcatttcacttcttactcgatgtagtataaggggtcaagcagtctcattagctacgagaagcaaacgattcgaatcgagtttttatccttgcaaggtaaacctaaacacacgacatgtcagggcactccggccccacacatgtcaaccgtccccatcgattccccgttcgcgtccaggcctcaccgccttggcatacaatgctccactgatcccggctgccgccgtgcagtgaccgcacttgtacccaccatagctagcatgggagacctagtctcaggtcgcatgagggataaagtcagcgcccggcttcactcaggtactaggtttatcggttaccatatttcccgacatgtgcttagtacgttcaaaagcttgactcaggtatccacacattaatccttaattcctttttcccgtctcatggacaaggcatcctccttggatccaagtccatagactaacatagatcccgttatcaagatgaatacaattaattcctgacctcgcgcaagtgctagaaaaatcactcgacttctaccgagatcctgattagcaagcagctactcgacctagcatactagtattcatctcaaaaaggaatcctaagttcatgcatctaggggtttcaagcaactcctacacttaagtgcacattacaaacctacaaacattaagtgtagtaaaatagcatatataaacggttatgcataaaaccggggcttgccttcaatagttggggctgcggggagatcctcgatagcagcctcgagagcttgctcctggtcctcctcttggacagatccttgctcggggatgagcacgtactctccgtcagctagattacaatctaatgaatgcaatgcgtaagatatatgcatgatatgatatgtgcattagtaatttaaacttttgatggtgtatgatctacttgagttagatagagctacatcttgcttacacgagatttttgggtggtatatttggtaaattggatcaaacttagctaagttacatggtaggtttattcttggggttctactgaattctttttaagacctttagtgagacttgtcaagaactcaagttggacttattggagtgagttttatttctcctttctttttctttattctctttaagtttttgtagtgggtttgaactacaagtcaccttaataaatttccaaaaattctgcaaaaattacaatggcttgtcactggtgtgtaattctctgtctcaaaatttggggtccaaaaagtgaatattgttctctggacaaaattaccaaattttagggcagaaggggtgatttgaactacaactatcatttagtagtaggtaatcctctaagacttatttttggtggcatttagaggctataacatgacttggtacatatttccagccattaatacttatcagttattttactaggattttctaaagtttctagccaaaggggtgctttctactaccactatatttgaaaaatatccaacaacagatttctgatttttcctagcttcttctttgcgcaagagcaatcattctgaagtttggcatctttttgcttaagggaagtggtagtgtgcattaattggattaaatggcctttcttacaaaatattggcaataggtattattttgcatctttccaatgggtttgtatttttctctggtggcctatctcattattggtctagcaaaattttatttacccattattgcattattgtggtttactcataatttaattgaactatggctcattatcatgttctatttatttaccttacttaaaatgatgggctggggtgtttattatttttgcagtggggttttggtggttacaagttcactggatttttattatcaattttgggtctggttttgtaattttagtaatagatttctagtgggaataatgctaaataaaacatttctctttgaatctgatctagactagaggttcctttatttttcctaggttctttgttacttaagcaaactaggaaaaataatttcatccactgatcattaatttctaaggcatttctaattttcctaagctttgggcagaaatggcttttaatggatatctacactaaatttttcaatactggggttctcactatttttaaacagtgtttaagtggggtttgaacatctacaaattttcttaggttcagcacaggaatataactaattttctttaattaaacaaggtttggtcagtttctgtatttaatttttaactctaaaaattagaacagaaagcatagagttcagtatttttaattgacagttcataatatttagagtttagaaaaattggtttgacaattttcggttaagtattcatcaagttatgaatttcctaagttctctgttcattaaaaagatttaaaccgaaatgattaaatggaaaactactttgcaacggggtccctggcgggtgttttaagttttccttgcagactagtcccctgggctactattcaattgagtcactgacatctcagaaaaccccctggattcttctaatcctaacccgaggtccttcccccaaattaaacagtacccgcagcggaagaaagggcggaggggcttaccagcggcgagattgctccggtgaggtggccgagggtgtaggggaggtccggaggatcacggcgatgtgcgggtcgccgtcagggatggtcggagtcggccggtccgcgtgcgccggcgggggagctcgtcggcggcgaggagtccggcctatccagggcacaattgaccgattgaatgggtcagagagcttcactgggtgctagggaagacatggttgcaaggaatttgacaatggcttaccggagagctcggtccacgcgcgggggcgggcgaccgaagtccggcgagggtgatctcgggcttccggtgaagttctgccgggtccgaggacttggaaagcttcacgggccaatggcgaagctaactgaagcgctggcgcgacttggacgcgactggagagagctgaccatggcggccgaggctctgaaagcttggcgggtggtggcgcggcgtgctcggggcgatttccggtgatctctgacttgggcaagacttgagagcgcgcggggatgaatgtccgaggcttggggcagctttataggcacggcacggtgcacgggcggccgtggaccggcgagcgcgcgtgggcgtgcactgggaggcgcgggtgcgcgaacgggcgtgaaccggaggtgtcagccacggtcgaacacgtgtgcccgttgcctctgcccaagttctagcgctgattgggtgcaaatcttcgcgaatttgggcaagatcgctgtgaaggatttgttcacctgaccttgctttgtcttttgtgtatggacgtcgcgcggttttaggctagggatagggagttgtagcgtcaccaaggtgccagtgtcagaatgtctggtcccgaggtcaatctgcgccaaaaccatgccaaatgaatttggtttgagttcaaacttttctagggcgtgttcaagggaatttggcacaactttgatatttggatctcctggttttgagtttcgaaaaacagagaacacagttgatccttggaaggaggtctgaaattcagaaatttagaaatctgaatttctccaagggttcatggttcatgggctgatttgggaattttaaaaaaacaaaaggccaaactctcttactatgatttgttagttatttgatgaactaaaactttgtaacttggtcatatctaaaatttgcatttccccccatgacttctcccaattaccctttatgcctaacttggcttacttaggatttattagggtttgagagtctttctctctcaaggttcaagacaagattaaggagagtttaagaagattcattataaacctttgctctaaattttcttttgatgttcaaccatttactaaatttacatgtgataataggttggggttagcttagggaagaaccctaggtgacactggggtgtcacagtcaagtcctcctggacttcaagaccctccactggcaactgctcttctagcacatgcagccatttcttcagctgagacacatgaaagacattatgcacagtagacaaattttctggcagactgagctgataggccacttctccacgccttgcgagaatctgatacggaccaatgtagcggggtgctagcttgcctttgactccaaatcttctgactcctctgatcggtgacactttcagatagacaaaatctctaatttcgaaactcagctctcttcttgtgtctgcataacttcgctgtcttgattgcgctatcttcaaattctcctgaaccatcttgatgttttcttcagcttcaagcaaaatgtctggcccgaacacttgcttttctccaggctgatcccattgcaacggagttctacaactcctcccataaagcgcatgaaatggtgacatcttcaagctggcctggcagctgttgttataggagaattctgcataaggcaatctcttgtcccatccggactgatcttggaacgcacaggctctcaacatgtcttcaaggatttgattagttctttcggtctgaccgtctgtctgcggatgataagctgaactgaaattcagatgtgtacccaaggcttcatgcaactgctgccagaaatgagaggtgaactgcgttcctctgtctgacactatcttctttagcacaccatgaagacaaacgatccgagacatgtacaactctgccaatactacactgttgtagttggtcttgacgggtatgaagtgggctgacttggttaagcggtccaccactacccaaatggaatcgtagccggctcgagtgcgaggcaatccgactatgaaatccataccgatttcatcccatttccactgaggaatttgcaatggttgcaacaatccagctggcctctgatgctctgccttgatccgttgacaactatcacacatagccacatgctctgcgatttccctcttcattccgtaccaccagaatttcttcttcagatcttgatacatcttctcacttccagggtgaatagaataagctgtctcatgagcttccttaagaatcaactcctgaatagactggacattgggaacacgcaagtggtctttgaaccatatcacaccttctgcatcttcccgaaagtctttgcctttgccttccagaatcagttgccggatctcactgatcttgtcatcattcttctgcgcttctttgatttcccgctccaaggtgggttctagctcaactgttactcctcgcatattgtttataaattcgagactcaacctgtcaaactctttggccaactcataaggcatcgggtaagcgaccatcaggttgacttgactcttcctgctcaaagcatctgcaactatgtttgctttgcctggatggtaatgaatctccaattcattgtctttgatcaactctaaccatcttcgttgcctcatattcagctccgattgagtgaatatgtacttcagactcttgtggtctgtgtaaacatcgcatttctgtccatacaggtagtgcctccatgtctttagtgcgtgaaccattgctgccaactctaggtcatggattgggtaattcttctcatgaaccttcagctgtcgggacgagtaagccacaactcttccctcttgcatcaacacgcatcccaaaccagtgtaacaaacatcgcaatacaccaagaagggcttgtgcacatcaggcaagactaagacaggcgctgtggtaaagttctctttcagtgcttcgaaggcctcttgacatttttgggtccacttgaactcaactttgttgcctagcaaagctgtcattggtttcgcaatcttcgaaaacccttcaatgaatcaccgataatattcggccattccaatgaagctcttgattcctcgagcatctgttggcgctttccagtttagaatgtctgccactttcttcggatccatagccaatccttctttgttgattatgtgacccaagaacaggacttcatcaatccagaattcacacttgctcaactttgcatacagttggtgctctcgcaacctccgcaataccatcctcaaatgatctgcatgctcttcttcgctttgggaatatatcagaatattatcaataaataccaccacaaacttgtcaagataatccatgaatacgctgttcatcagattcatgaagaaggctggtgcatttgttagaccgaaagacatcacagtgaactcatacaacccatacttggtaatgaatgccgtcttcggaatgtctgagggtcgaatcctgagctgatgataacctggctcctctcaactggtcaaacggatcttctattctgggcaaggggtacttgttcttgattgtgacctcattcagagctcgataatcgatacacattcttccggtgccatctttcttctccatgaataagacaggggcggcccaaggcgaggtgcttggtcggatgtaacctttctctgatagctcatcgatctgcttcttaagctcaaccaactctggtctagatactctgtaagctctcttaaagatgggggcggtgccaggaagaagctctatggcaaactcaacttttcgctcaggtggcatgcctggtaattcctttagaaacacatctgggaactcggacacaaccttgataatctcaagtggatctaccttactgctattggtagccatctgataacaacttcctttcttcggctcaggcgggactaactcggtcaccacttcctctcctagtggggacatcaacttgattgtcctcttatcacaactgataactgcctgatacttatctagccaattcatccctaggatgacatctattccttgagtacccattactatgaggttagcgggaaacactatccccctcatttccacacttacattcaagcaaatgctatcggctcgaattctacgactggctgagtcaatttgaatgggggttgacatggtagtaattggaagattatgtgcttctacccatgatgcagtaatgaatgaatgtgttgctccagtatcaaataacacttctacaatatgggagtcgactggaaacatacctattgtcatgctggggttctcctgaactgcttcagcctccaagtggttcagtctcccatggttatagtgtggctgagagcggttgcctgctctaggctgcgacacattctgctttgctggggcattggggcctgactgctgctgggctgccttcttcggacattgcatcacccaatggccttgctatccacagtggaaacatgctctatttccaccctgaactggtgctgcttgactattttgctggttcgctggggcaggaagacgaggtgcctgctgattctgcctctggaactggcctcctcctggctaattgttttggcgattctgatgttggtgctaagggtactgcctttgaaactgctgctgctgaggtggacgctggttctgcctgaactgctgaggtggattgcctgagaaacgaggacaattgctgcttccaggctggggtccactgatcttgcgcttacgatcctccatctctttgcacttcctctctatcatgattgctctgtcaatcaggtgctgaaatgtcgggaaggtatgattcatcagctgatactgcagagggtcaaccaagcctctgaggaaacgatactgcctcttggcgccggtgttgacatcttcaggagcatagcgagacagttgcagaaatctgtctcgatactcactaactgacaatgacccttgcttgagggccaggaactcctcctttttcactggcatcagacctgcaagaacatggtactgacggaagctatctctgaattctccccaggagatggtgtcggggttggcatgagtggcgaggtaagactcccacgaggactgggatgctcctctcaactaacagggaccatacagaactttctctctgtcatcacactgagcggtatgcaactcctgctccacagtgcgcagccagtcttcagcatccatggggttagaagagtgagcaaacgttgggggatgacctctcatgaatttggcacgcttgtccctaggcatctgaggcatctaaggctagggtggtggctgctgctgctgctgaatggtggccagactctgaccgatggcttgaactgggtgacggaaccttccaagtcattagacatcagacaaccctgtagatgttcctgaatcacttgtcaagttcggtatcttctttcttacctttccaggaacgtttcacccgtcttgcagacattacagaacatcggagatatagaaatgcggaagcgattacataaacttacatttatttagaaagtaagatcaagttgcttattacagaccagagttataaaacaagtgctgagtagtattattacaataccaagggaggcaaaaactcctcccgataagttcttacataaaagtttcttatggaggaccatgtcctcccgcagcctcactcttgtttttcttcatttggaaccaccttggtacaaaagcaacaaaaatttgctgcttcctcacctaaaaacaacgagggaataaaccctgagtatggaattactcagcaagtcttacccgactaaagaaaagaatctcaagggtatgttggttataagggagtcaaggtagggtatctcaagatcaaagactctgttttgcataaatgcttactaagggtggatccttaaaaatccaattttattttcaggttaggttaacttacctatatctagagttcttgctaacctagttcaagcacttgacctgcactagccaatttcttaccaatcccttcatctttagtggaattctacgtataagtcagtgaccaagtctccataaccgcggaggtaccgcgatccgaatcgattatactcagctgaggatctccaatcacacgacatatgtagcacttaacccttgcatatgtcaacccgccacaggggttcttaagactagatcaggttcacgcaaaccgagagcacagatacaccaccgtccagcctcttgccacggagagtacacactactctcgccaccgctccacgcccatttcgtgttatcttattctggccttagtctgcccgaggcaaggcttacccatgacgaggcatgtgaccagttaaagggtcctcggtcagcaggcctacatcgacacggtccttaatcgacacagacagagacactacaccgagactctcttctcttgcaagtcacccgcctggtctcagcttaatcatttaaacccaaaaacttggtacctggcagaggtacatcttttccgatgttgaacccatcaaggccctgatggatccaccatcaagttttattttcgaaaacatcccacccactttgccaatcatcttttgtaaaacaaaaccttttgtttttgctaaggcaatactaagcatagtaaaaaccttttgtaaaacagggtatcaaggaaggtaatcaagatcaaggaagataatgcaggaattgtttagcaaccaactcctattacttaatgcaacaagcaagtgagaaagattttaaaacatcaaggaaggtggcaaatgcaccggggcttgccttcgttagtaggtgagtcaggctcaggcccacagatgtcaaagtagagacaagaccctacctgagattcaaagggtggtggtgtcttctcttcggtcacttcaatctcttcttcgttttctaaacataaccacatatatgtatataagaatgaatgccatgtaatgctcatgagagtgcaaatataataagaatttattatctaaggtcttgaatacaattttccttcacggaactccgagaacttagggtttccggagtcagtaaaggagttcatagggcagggggggttttgggttctagttatcaaacaaggtccaaatcaacccaaactctacctaaggcttctacataatgtatagaactcatataaaaagtttggacatttttggaattaccatatgttttctaaaaatccagaactaatactttaatctactttaaatgccttaaaattccttatttaacctaaatatcatgaaactatttttattaaatactatggaaaataagaagtctaggaaaattggtttgaaaattttaggatttttctacatttttctatagattttcaaagcccttctgaaaaagaaaaaggaaaagactgaatagcattgggctggcttcagcccaagcggcccagtccagagggaaaaacgcgcgcacgcccgcgcgctctggtgactttgcatagatgccctcaggttttctggctaaccgaaacaggttctttcactattacactgtgtcgctgacagattacagaaacgtcctcggtcttctatttcttcgcgaggcgaggtccccgacggcgtcgcgcgcaaggaaactccggcgagcacctgtaccggccggatggggcaacgactagggttcccgagcgacggacacggaattagactcatcccaaacctttcccccaacttaatttcactgatgatcaagtggtttgttctggccacgatgaccgtgagcatcacggcgagacaatcgtgttcccggcgaccagaggacttctagttcaattacgtgggtcgacgagcatcaccagcatgcacagatgctagaacaggaacaaaaagggtatgagcagacctgtggagggctggccacggcagggtgtgattcacggcggcggagataaggaagaataccatcgcagtgactacgtgttccataccgtggcaactattccggtgatccacagggagctaaagtgaatcgtggcggtgcggtggcaaggcttggacacgtggcgggcaacggcgacggcataccagcggtgagattctaatccgaggggcggtgagaaaggggaggggtattgcggctagccggagtggcgcccagctcaccggcggcaaagatctttcaccccgcgacgctatccattcacccagggcacgaatcgggacgttggcagcacgaatcacggcggagggagtcgtcagcggtgaggacagtcgcgctggcggtctgatctgcacaagcactgttccatggtgaattcagtcagatgaacctgacagccaatgtttgaactcgatttgctcctagattcttacgacaacacaaccagtgatctgcagcaatattgtagagctacaaaccaactacaactttgtcatagcaaccttggttaaattcttactaaatcagacttgaattcatgctcaaagcctcagtgattgcactatctgtctgaaaattcagacattggtaccctgacagcccaactttaggcttagttatctctggatttttcttaacaactgagctcatactcttaagcaaagttgttctcctatgattgagctacaaacttgatgtggtgacctagggcaaaaaccctataatttgaaagttacaaggctcaaagattgagcccacaaatctgaaatttagacttagagtaaattctcaattggcgtcctttttgcaaatcaatccaaacttaggatttgtcttgtaaatcttcccaaatatgaaccatgtgactttatatgctttatcatggtagtttttacacttcggtccaaatgtgcacaatttttgcacatagacccctagggtttggacttagggttttctagggttcaaatagggtttttggatatcccaggggtataaatgtgattcaagtttatttttgggaatatttcatgactatttccctaaagcttttaggttttctcaacttgggctaggttttacccctttaatccctatttagggttaagttccctattcagggttctatttgcaaaatgttataacaatacaacttgtttgaaatttttacctagtaaatgcactctaggtgtgtcaaacatatgcaatgccaatgtttatgatgctatgctcaagttttagttgtagtaacaccaggggtgttacatccttccccccataaaagaatctcgtcccgagattaaaagtcctagggtgagtaatggaaaaggaaatgtgtcacatttttatttccttatttctggtacaaggcagggggtggtgtggggttcactctttattacaacaactaaacacaccttataaaacacactttacaaattacatgaggctaaaaagcctgggaaattcttatctaaaaagtcttgagtttcccatgtagcctcatcttcagaatgttggttccactgtattttatagaacttgagagtctttcttcgggtaaccctgtccttttgatccaagacccgaatgggatgttcggaatatgtcaagtctggttcaaggacaacatctgtcacttcaacggttcgatcgggaatccgaagacatttcttcaattgggacacgtggaacacattatgtacagcagacaaagtttcgggtagttgaagtcgatatgccactggtccacattgctcaagtataggtaatggaccaatgtacctgggtgcaagcttcccttttatcccgaaacgcgatacacccttcattggtgaaaccttcaggtagacatagtcccctttaagaaaatacaagggcattcgtcgtttgtctgcataactcttctgacgagcttgggctttcttcatattatgaattattttctgaaccttttctttggtctctttcaccatatcaggcctgaagaagtatctttcaccaggtttagaccaatttagcggagtacgacatcgtcgtccatataaagcttcgaaaggtgccatcttgatactttcttcatagatattattgtatgaaaactccgctaaaggcaagcattcatcccatttttgcgagaagtccagaacacatgcccgcagcatatcttcaagtatttgattaaccctctcagtctgtccacttgtttgtggatgataggccgaactgtggagcaatttggtatccagggacttatgaagttcttcccagaatttggatacgaattgaggtccacgatccgacactatagtcttcggaatcccgtgcaaactgagaatacgagcaatatacaattgggcataaacagcaactgggtgcactgtcttgacgggtagaaaatgagcaatttttgtaagccgatcaacaataacccagatagagtcatacccctttgcggtcctgggcaatcccacaataaagtccatacttatgtcttcccatttccatgttggtattggtaaagactgtaatggaccggcagctttcaagtgtatggccttgacacgtctacatgtgtcacatctagccacatagcgtgcaatctcgatcttcattttcgtccaccaataatgttgtttcaagtcttggtacatcttagtgcttccgggatgaatagaatagcgactaagatgtgcttcatcaagaatttgctggcggaccacttcattcttcggcaccactatgcggttattaaaccatacaatgccttgatcatctcctttgaaacattgggcttttccagcccttatcttctcacgaatgtgtttcataccctcattatcccgttgagcatgaattatcctttgcaagaggactgactcaagctttagggttccttgttggaccattcccaggtttagcttctccatctcctgacataatgtattgtcagaggtcttcaccgtaagacaatgacaggaaaccttacgactaagtgcatctgccaccacattggccttgcctgggtgataatgaatttccagttcataatccttaataagctcaagccatcgcctttgtctcatattcaattttgactgggtgaagatatacttcaagcttttgtgatctgtataaatgtgacagatattaaccagcagataatgacgccaaatcttcagggcatgaaccacagcagctagctccagatcatgagttgggtaatgctcctcatgtcggcgcaactgccttgaagcatatgcaattactcggccttcttgcattaatacacagctgagcccactgcctgatgcatcacaatacacatcaaagggcttagtgatatccggttgagccaataccggagcagtggttaataatgtcttcaattgctcaaaagcttcattacactgggaagaccaattgaatttaatatcattcttcaataaacttgtgattggcttcacaagcttagaaaaatcgggtataaatcggcggtaatatccagccagtccaaggaaacttcggacttgatgaacagtggttgggggtttccactccaaaatgtccttgactttgctgggatctaccgcaatcccccttgcagatagaacatgtcccagaaactgaaattcctctagccaaaatgcgcatttgctgaacttggcatacaactgatgttctctcaggcgcgttaacacgatccgcaaatgttgagcatgctcctcttcatttttggaatatattagaatatcatcaatgaagaccaccacaaacttgtccaactcggtcatgaacaccgagttcatcaaatacgtgaagtgggcaggagcatttgttaattcgaaagacattaccaggtattcagataatccatatcgcgtagtaaatgcggtttttggtacatcctcaggccgaatacggatctgatgatagcccaatctaagatcaatcttggagaataccctcgccccggttagttgatcaaataaaatgtcaatcctcggaagagggtacttgttcttgatagtgacctcattcaggggtcgataattcacacacatccgtaaagtttgatctttcttcttgacgaatatggctggacaaccccatggcgacgagcttggccggatgaatcctttctcaagtagatcttgtaattgaatcttcaactctgccaactcattcggaggcatacggtacgatcttggagaaatgggagccgtaccgggcttcagctcaattacaaactctacatccctttcaggtggcaatccaggcaaatcctctgaaagacatcgggaaactcgcatactactggaatatccttgatttctggtataatggcttcataaactctgccagtagcttgggttggaatggggataggctaaagaatttcttcttgattatgactcaacctgatagttctttgatcagtgttgagggttgctttatgcttggccaaccaattcatacccaaaatgacatctatgtcttggcctttcagaatgatcatattagtaggaaagtcccatccggccaatgttacgggcacttgataggccacttctctagtaaagattttgtcccccaggtgagtgaattttaaacccgtcttttgattcatggcatgaaatgcaatgttgctccacaaatttcttactgatgaatgtatgcgaagcaccagaatcaaagagaataactgcgggatgattggccacaaggaacgtacccatcattaccggctccccgtccggtgtagtggccacttgtgtataatatatgcgtcccgtcttcttggtatttttgcccttagtatttcccttgacttgagatgaattcccagaaccttgctgattatttgactggttttgctttggataagggcaatccttgatgaaatgcccagatttgccacaattgaaacatccagtcgatgaactggacagagcagggaatcgagtgcctggggcacccggctgacttggggcagtgggggcattattgggacgaataagtattggttgcttaaaagggaaggagggtgcacgagagcgattctggttggaaggccggagaacaaaccgttgccttttcaccgagccctgactaggcctgtcacctccaaatcccttggattttccgacacctgcatacttcgcttctactgccaatgctgtactgacagctcttccataagtaagatctatgcaggttgccatttttctttgcagtcgatcatttaaacctctcataaaacaatttttcttcttcagatcggtgtttacttgatcgattgcatactgtgacaaatgattgaacttattgagatactgattaacagtatcccctccttgcttcagcttcataaattcttcttgcttcatgtgaagaacaccttctagtatataatgttcgcggaaggctaccttgaattcttcccatgttatctgatgattggccggttgaacgaccacgaaatttccccaccaagtgctggcagggccgcgcagttgctgggctgtgaataaaggcttctgggtctccgaacagcgcagaagtccgaatttttgctcaataacctgaatccattcgtcggcttctaacgggtctttggctttaacaaacaggggtggacgtgtctctgagaagtccaagtaagaagtttcacgggggccctgttgataaccccgcccgccttgttgctgaaactgctgacccgccatctctctcagaaaacgggtattatccgcactcgcatttactaaggcggcaatcgcctcggcaagtgtgggagggataggaggtggatttggggtagtctccctcccactggaggttccagctgcatcctgtgatcgggtcttggacggcatctgtggcaacaaacatttgaaagcaaatataatatgccaaagacaaaaccatccaatttacattaccaaaaagagtaatgttacagactcaattttatacaacaggatacattacctagtatacaatagcactacctattatacaatagtacaacctacaatacactacttctattactacaccactattcctgcttttggttgctcctggcagcctcgtcgtcgggtgtgggagaccattcatcgaccagcctcatagaaggagggggcttaaaaaggtctagctcaccaccaagtgcttctcccgcaacgtgcgagggtccggcttccgacccgacaggatccataggtgcactgggatgtagttgcgaatacagtacatggacttcctcatgtagggtattgcaatacgcctgcagattgtcaatggcagcgctaagttcttcgactcgagctcgagcctttgccttcttagcccaagccactgaacgagactgtaccgcccaatcgagcgctaaatctcgatcagcaagctgatcctgcagacggcggatgtaacctctcaattcgtttattctgtcgccatccgcgacccatatgttggtcctgcgttgcagttccgtttgaagctgatttactcgggcttcaagatccccaatcggatcgttgcttccgctactactatcctcatctcgtggggcaagttgatgacgaggtactcaaattgggccagttgacttacgcgcggtcttcctcgtgcgcggcggcatttctttagggggaaaattttattagtataattcttagcatgatgcatgtataattacagaaccaaccttagttgattcataccttctatacattgcactcctcctatttggtctttcatatagattcttcatatatgagggataagaatggaagaaatctttctaggtgagtttttagaaaatccttttgaagatgcctcataatatatacaaagaagggcttcgctctgataccagctgtgacggaaccttccaagtcattaggcccacctacagttgtccttgtccaacagacatcagacaaccctgtagatattcctgaatcacttgacaagttcggtatcttctttcttacctttccaggaacgtttcacccgtcttgcagacattacagaacatcagagatatagaaatgcggaagcgattacataaacttacatttatttagaaagtaagatcaagttgcttattacagaccagagttataaaacgagtgctgagtagtattattacaataccaagggaggcaaaaactcctcccgataagttcttacataaaagtttcttatggaggaccatgtcctcctgcagcctcactcttgtttttcttcatttggaaccaccttggtacaaaagcaacaaaaatttgctgcttcctcacctaaaaacaatgagggaataaaccctgagtatggaattactcagcaagtcttacccgactaaagaaaagactctcaagggtatgctggttataagggagtcaaggtagggtatctcaagatcaaagactctgttttgcataaatgcttactaagggtggatccttaaaaatccaattttattttcaggttaggttaacttacctatatctagagttcttgctaacctagttcaagcacttgacctgcactagccaatttcttaccaatcccttcatatttagtggaattctacgtataagtcagtgaccaagtctccataaccacggaggtacggcgatccgaatcgattatactcagctgaggatctccaatcacacgacatatgtagcacttaacccttgcatatgtcaacccgccaccagggttcttaagaccaatcaggttcacgcaaaccaagagcacagatacaccaccgtccagcctcttgccacggagggtacacgctactctcgccaccgctccactcccatttcgtgttatcttattctggccttagtctgcccgaggcaaggcttacccatgacgaggcatgtgaccagttaaagggtcctcggtcagcaggcctacatcgacacggtccttaatcgactcagacggagacactacaccgagactctcttctcgtgcaagtcacccgcccgatctcagcttaatcatttaaacccaaaaacttggtacctagcagaggtacatcttttccgatgttgaacccatcaaggccctgatggatccaccatcaagttttattttcgaaaacatcccacccactttgccaatcatcttttgtaaaacaaaaccttttgtttttgctaaggcaatactaagcatagtaaaaaccttttgtaaaacagggtatcaaggaaggtaatcaagatcaaggaagataatgcaggaattgtttagcaaccaactcctattacttaatgcaacaagcaagtgagaaagattttaaaacatcaaggaaggtggcaaatgcaccggggcttgccttcgttagtaggtgagtcaggctcaggcccgcagatgtcaaagtagagacaagaccctgcctgagattccaagggtggtggtgtcttctcttcggtcacttcaatgtcttcttcgttttttaaacataaccacatatatgtatataagaatgaatgccatgtaatgctcatgagagtgcaaatataataagaatttattatctcaggtcttgaatacaatttttcttcacggaactccgagaacttagggtttctggagtcagtaaaggagttcatagggcgggggtgtttgggttctagttatcaaacaaggtccaaatcaacccaaactctatctaaggcttctacataatgtatagaactcatataaaaagtttggacatttttggaattaccatatgttttctaaaaatccagaactaatactttaatctactttaaatgccttaaaattccttatttaacctaaaaatcatgaaactatttttattaaatactatggaaaataagaagtctaggaaaattggtttgaaaattttaggatttttctacaattttctatagattttcaaagcccttctgaaaaagaaaaaggaaaagactgaatagcattgggctggcttcagcccaagcggcccagtccagagggaaaagcgcgcacgcgcccgcgcgctctggcgactttcatagaggccctcgggttttctggctaaccgaaacaggttctttcactattacactgtgtcgctgacagattacagaaacgtcctcggtcttctatttcttcgcgaggcgaggcccccaacggcgtcgcgcacagggaaactccggcgagcacctgtaccggccggatggggcaacgactagggttcccgagcgacagacacggaattagactcatcccaaacctttccccccaacttaatttcactaatgatcaagtggtttgttctggccacgatgaccgtgagcatcacagcgagacaatcgtgttcccggcgaccagaggacttctagttcaattacgtgggtcgacgagcatcaccagcatgcacagatgctagaacaggaacaaaaatggtatgagcagacctgtggagggctagccatggcagggtgtgattcacggcggtggagataaggaagaataccgtcgcagtgactatgtgttccataccgtggcagctattccagtgatccacagggagctaaagtgaatcgcggcggtgcggtggcaaggcttggacacgcggtgggcaatgacgacggcataccggcggtgagattctaatccgaggggcggtgggaaaggggaggggtattacggctagccggagtggcgcccagctcaccgtcggcaaagatctttcaccccgcgacgctatccattcacccagggcacgaattgggacgttggcagcacgaatcacggtggagggagtcgtcggcggtgaggacagtcgcgctggcggtctgatctgcacaagcactggtgaattcagtcagatgaacctgacagccaatgtttgaactcgatttgctcctagattcttacgacaacacaaccagtgatctgcagcaatattgtagagctacaaaccaactacaactttgtcatagcaaccttggttaaatttttactaaatcagacttgaattcatgctcaaagcctcagtgattgcactgtctgtctgaaaattcagacattggtaccctgacagcccaactttaggcttagttatctctggatttttcttaacaactgagctcatactcttaagcaaagttgttctcctatgattgagctacaaacttgatgtggtgacctagggcaaaaatcctataatttgaaagttacaaggctcaaaggttaagcccacaaatctgaaatttagacttagagtaaattctccattggggtcctttttgcaaatcaatctaaacttaggatttggcttgtaaatcttcccaaatatgaaccatgtgactttatatgctttatcatggtagtttttacactttagtccaaatgtgcacaatttttgcacataggcccctagggtttggacttagggttttctagggttcaaatggggtttttggatatcccaggggtataaatgtgattcaagtttatttttgggaatatttcatgactatttccctaaagcttttaggttttctcaacttgggctaggttttacccctttaatccctatttagggttaagttccctatccagggttctatttgcaaaatgttataacaatacaacttgtttgaaatttttacctagtaaatgcactctaggtgtgtcaaacatatgcaatgccaatgtttatgatgccatgctcaagttttagttgtagtaacaccaggggtgttacaaactgcctaagtctgcatcatgaacatctgctcgatcgacatcgggggcgggggtggcagctgctgttgctggggtgcctcatcatgcagagctacctgctcctactgagcacgccttcctcctctacgcctgttttctgacatctgcacaatgcatccacacatcagaactgatctggcaaatcttgcagcataagaaaagggtatagaattctccacaacactgaacagatgaacatcttcactgatctccaacacaacttctcatataaagaggaaagtagaataaaaaggcttcccaactagacagctaactttactaacatataacagataaactaaaatgcaggggatacccacactctggtaacagtcattacaaagatccaaatccagcatagttcaccatgacaaacataaatgcacaggataagcaaactaccctgtctaactaagactaactaaaagcaaggctaacgctaagactatagcttctatgtatatattttcgtattaattacaagatctgacgctgacgatctatggttctaaatttatcttggtcttacagtcggggttgccataagactggtgtccacgctgaggtgagcggtacgggtgctgagtcccgacgggagcgggggagccatcatccagatgacgatgctccacgcgcttagcccgcagctgggcgatctcagcacgagccctactcagctcgtctagcgcatggtccagctccgtgtttagcatggcggctaggttgaatgtgctgctcaacctaggattgtcctcactaataggtgagacaatcacgcctcctgtgctgccagatggatggcgggggtaatacttcaggttgagaccatcagctaccccactgagcactgaatagtagtgcgaaagcgcacaccgtgcgacatcttgcatggccacctcagctgagtcccgctcagagatagagtagtgctctgagcagacctccgcaccccgaagactgttctccggacggtgcaccaagcaggtcgcctcccagcggtccgagtagaccccgtgacggtgctagaagaccacacagtgatactcgatagaccaagtacgccggtcgagtgcccaacgtagcagggtgtcgagcgcatcgtggaagtgacacccgcgagcggcgtcgcgagtgatgggtcgagcaacccatccttccaactcctggtcggcggaaaggtcggtgtcgtggctcgagctgctgttgccacctccgtcgtctgggtctcctccagtagctactccaggggttggggcgctcagtggtggtgcagggggcgcctccagcggaagcacgggggagcagctcctcacagactctatctcctgctggagcgagaaagaagagccctgctgctcctgctcctgtcatcgacgctcctactcctcgtgcaggcggtggtgcaacctctccaagtggctggactgaccggtcactggacggcgaagcggacgctccgtgagacaggagggtaagaaggggatgacagacttccgtgtagtgtgtctaagacgagccatctataaaagacaccgcaagcataagagtgagaacagaactaatatgaccagcaaataaaccataaataaatgaaggattagaatgaaacacaattttcagcaaggtataatatatagtagaacataggtttggtcgatatgaccaacttttgaagggatatcaaagtcaaggtgagaataggggtctatactccttagaacgaccattctactctaggttagtggtcctacagtcaacctggctttaataccacctatgtcacacccagttttagaaggcaaaccgaatgcgaaccatgtacgtgccaggatcagcaattcacgtacacagcagttacataactagacatcatcacacaatgctcaaataataacataaaaggggaataatagtcgattacatcatatgtctgagacatccacatagtctttacattaatcaaagtgcggaaaagaaacgtagatacacgcggccttcagaggcagccaactaggggttgccgctaacccacgcctagatagggatgaaaatggtcggaaacagtatttattcggtaatcagtttttagtcgtttttctttgattgcgaataaataggatatataatctacaatacaaatttgtattcttgtttttaacatccaacttgtaaagattcataaaaggtaaacctcaaattcatcctatattttcacaaataatagatataaacttcggtatggattcggaaataaattcggtaattttttcaacgtttcatgttgtagggagcaaataatacataaaacaatttgtgtaatattttattcatatgtgtactaatgtgcttgataacataagagaagatcaacattaaattttatgcatatctattttaaaatattaaatttgttctaacagttcggattaccactttcatccctacgcctagaactcgtcgtaatcttggaactcctggaagtctccttccatggcttcatcttctcctgagcagtggttgcaatgctgacaacctggggaggggggattggtgtgtagagcaagggtgagtacacatcaacatactcagcaagtgtccttttctgctgtagtggactagctttatgtgggggtaagtcaagcagttgcttttaattggtcagattattattactagtggagaaagccaagttttagaattaacccacgttattaacccaaacataccctttccagacggaaagaataccacttaccattaccataatcaataccaaaaccatcattctcattgccacctgtaatccgaacatctctgctcaagtaccactaatcactggagctcctttggtcgctcataaccgcgagcacggctgatatattagtttcataacactttgcagaggttgcacactttacccacaagccatgattccctcttacctcgggccaatcaaacccttaaacactaccaaggtgaataggcagggtctcactacgtagcctttacaaagattccctgaggctgtagccgcccgttaggtttcctaaatgtaccgcactcctccccaaggggcaaaccaaccttggcagagcgagccgcatacaccgagccccattgacagcacgacggcgaaacgaactacacctcagttcctttaattattcagctaagggcgtcccattctgccctcatggttgcactgttttcccggacagtcatccaacgagtaggtccttacggagaggcactccagaaacagctcgagcccccttaaatatcacagtaccatcatcataatcaaaagggaaaacagtgtatcatagataatttcatcatgttcattgattaatgtgaagcactagcataaagctaaactataataacccaaccaaaataggtagacaaggacaagataaacaaaatctagttaatccttaggtataaagtgtgtaaatacggggagtgagttataagaatgagtaggacatagatgggtcaagggacacttgcctccaccaaccagctgctgctcaggggcttctcctgtgagttcctcgggctcttcaaccaggtcgttctctatacgagttcaaacatacattccacacatttaataccaaaagaacagtacaccatacaacggaatgcaataaataaacagacgttcaacgcggggctcgcaattacggttaagagagaaagaggaaatgatagtcgggtctacggtcgagaggcgatcactttacataattataaattaaaccattcgtttaaatagaagggtaccaaattagacactgcgtttagcataaagtaaagtcatgttccacatttagtcactataaataggtaaagatgaacgaaagggattggtcatacggcgagacatacgacacaacatttaaattgaattaagaaataaatggcttgccacgcgacagagcgcgcaacaagattcttgcattaattaaagacaaacgttaagcgttgcgcgacgaaacgcacgacggcttacgccaacagaactgcaataaatataaattaaacgaatcgtcgcgcgacgaagcacgcgacgcaacccattaataaatataaatttaaaaggaccgtcgcgcgacgaagcgcgcgacgcagcacatttataaagatgaaattagaatgaaccatcgcgcggcgaagcgcgcgacgcaacacattgactaaacaaaataaaaatggattaaacgagggttaaacgaaacgcgactacggtcgcacgcgtgagagcacactgcgcgtgccgggggcacgtgaaccgtgcaagccgcgtggggcgtgaggctaccggggcatgggctcgggcaggggcgcgcgagggcgcagccgggggcacggccgccggggcgcgggccagggcacagtcgagggcgcagccagggcacgcgaggacacagcagagggcgcgcgggcagggcgcggctgggggagcggcgcgcgggaggggcgcggccggggaggggttcgccgaggggggcgcgacgcggggaggggcttcggtcgaggcagggctcgccggggggcgcgcgacgccggaggggctcggtcggggcgggactcgccggggggcgcgacgtggggaggggcttggccggggcgggactcgccggggggcgacgtggggaggggctcggcaggggcagggctcgccgagggggggggcacgacgcggggaggagctcggccggggcaggactcgtcggggggggggggcgcgacgcagggatgcggcgtggctgagccgccgccacgacgctcaacggggcaggggagggcgcgtggcgcgcgtgggggagggcgcgcggccaggggaagaagaagggagggggaggtgggagagtgagaaagggaaggagaggggaaaactcacctccggggatccaaactccaacgatcttgtctccaaaccctagggcaccacggggagagagagaggtggaacagggagagggaggttactgcgcgggagaaaatcaaatgagacaacaggattagggggagggggcgcgtgcatggtagggcaaggggcgccaggggcgcatgggccggactgggccggactaggccgggctaggtcactccgcgggtcgaacaccaatcggaattctgatcgcgaaccaaaatccaaactggggcgagacaaacacgcgatattagacaaagaaatgcgcttcggcatgatgcaacacccatgacacttaggttttgtttatacatgacacggacgcccgtcattatactggtttgaaattgggaagaaggagcgaaacgggaagagaaaagagagtaacgcccgaatttggtgaatgaaaagaagaaaaaattctaccccaaattcagggtgttacacgaggaccgcttggcccaccccatggcggttgtcagtacgagtcgtgggtccttgctcctatggaaggaaagaatgaaaagaaggaatggaccgagctggcgagagaccttaccgagctgtcgttcgacaatcgtggggtcataatggtcctagtcgtggtgggcgtgctcggttgacgtctcccgtctaagcaagagttgatgggcatcgtgttcaaggttcggacagggcacgcttttattaggacaattcacatgaccttcttcaaatgttcgtagtgatttagcgaggtacttgtgcttaccgggatgcacaccttgggtggtggggtggcaatcgttttgtgtgtcggagtccacacgattcaaccccctcaccggtcctctaacaccaggccctattctttgcacctccgatgccgctccgagtccttcggcgctcttgttttctcgtcctgaccactcaccaccgccattcttccttccctgtccatggcgttctgggatcactcttcgattgagcgtagtaatttggatgccctcatcgcctgcggtcttctgcgcgaagaagatctgaagatccacggtcctgaggtcgtgcccaggccgccaccaagttttggggtgtcattcatgcacttaacgagtggggtttcgcaacgtcgtcgcaccctttcttggtaggcctccttcatcactaccagatccagcaacaccatctcaatactaacaggattcaacacatggtgccctttgtggtgctatgtgaaagggtacctgggggtcgatccctacttttgccttaggtgccattctgcttcaccgagctgttacgggccttctctaggcacatcagtggagtcggcgcagatcaggtgtgcaagcatccacctacatgggacacgatcgaagggctacatccaactgcgattaagctcatccaacaaaggttggcacaagtagtggttttatctttgtaactgtggcccgcccacagccgccgctcatgacctccgccctttctcgcccgaggttcccacggaggcctcccaaagcaagatatggggaatcctggagggtgagaagaggcgggtagccggagccctctccatcgttttgctcctccacgagaaggggtgacggtcacatgggtgagaagaggcgggtagtcggagccctctctgtcattttgcccctccacgagaagggtttgacggtcacatgggtcatcaacaactatctctactggggagtggctccgcttatggcgaggaagtttgccttgtttaagatgacggtagatgccccgctagagggcatgacattggtcacagtggttcctagcaatgcggacattgtctaatctaaaaatataatctgactttcgaaaataactaacactaatttaaatataatatacacatccaaagtttttgcataaaattaaattaaacaatcagtatatgccaaaattttaaaagtagatatatatacttacttgtatggttgagggagacgatggtgttgagaactacatgcatgtttggtttgctacctaacttgccacactttgcctaacttttttgtctaaggttagttattcaatttgggcgactaaccttaggcaaagtgtggcacatttagctacgaaccaaacaacctatgtccccatggatcaccagatctgctccctttccctcccgtcagcagtagaggcgcgagaagttgtaaagaacccgtctcttttcctagaagcacgacagagtaacacacgagacacatgatatagggttgggcctctggcctctttctcttctctgtattatgagggagtgtacatgttccttatatagagatgtgagacccctcaggggcaaagcaggtatttgcccatataaccctaactagggttacttaacactcccccttgggtgaataccgtgaccaacacatgcctcgttaaaactccgaaaacccagtgggaaaaatgtggagaaagagtgcatggtgataaaaattgcatttgcactttgttgcctcattaaaaacctcatgtgagaaacttcaagaaaactcaccaagggaaaactcatcgaaacatattttgatcctctgggatctagattctatcgaatcttctacaaaggctaactttagaaatgtgctccccctgatccttgcaaaaccgtatcaatatggcacaatatcttcttctggaagtaaacaaacatattgcatactgttgcaaggattatatcaagaacttcacatctactcacttctaggatatacgaggtaaatgcatgtatcaacacaaacaagccactttaactgatggtgttcgatcaactggatctttatatttgatagaaacttccataaaggttcacatattgatcatcaagtcgatgccttcagggcttagaatatgacatttattgtctcacgattgtgatcaatataagcattcgctccccctgacgatgacatctgtcaaagttgttatccctcataactcaagcatattcttcaagatatatgtctcgttgttcatctggaaataacgagaatggatgaggttcgggtgctataattttctatcttacaccacattgtgcaaagcaagtaacatgtccttctataggactttaggggataatatagttgcaatagtacatattctaaatatgacacatcgctccaggcattcatccattgcaacatctatgatggtgtaacaaaggtccatcaaagatcgtaatccatcagggatttttcatcgatcaggtaaatctttatagtctatcattctggcacaatggggatattttgctagtaacacctaaaccttataggtttctgccattagggctttagaggataccgtaattctacatcaagtggaaaataccatgagtaaaactcgtagaatgcacatgtgcttattcggtgaacttcaagttctttggtacctcatcttattccttttcgggtatgtatgggtctttatcccttaataggggttatcaaactttggtgttcaacacagacttaatttcttctagaaaggttccatctgggaactataatcacaactaggagatattctccctacataggagagtgatcattcatcaggaatatattattcggtatgagatttatatgttgcatatttataattcaaagatatgagtcctcctaggatctcatgatggatcttcagaatcctattaactgcatattttaattcatgtcatttgctagatatattacataatggaacagtgtttattcaacacttatgtggggtgggtctctcacaagaccacttgaaccatcgcattcaccacacattatttcaatagtgcccataaatgtccgaacttcaagctcgcgactttcattttgcgattattggttcagccttgattgcatttatcaatgacccgataagagagcctaaagcactcatgcctaggactttgttttggatccctttgcaatctagagaggcaagataggtgtcgacacatttgtctcccacatttaataatgatctccatcatttcccaaaaaacgaaggattcattgttccgtattcccagcacagtgatattgtgcgctttgctatgaatttcatcatcaagatgaacctcttcgcgaggcaaatcaccagcagggcgagttcaccggaggagagttattacagaccacatgaatctgcaatcagaacatatgctttgactaagaccaacatatcatattcgcaggcgtccccgagaatagatcaaatgtcaataagtcaaatgtggatattatattaatcccgggtatatccacatctacatcaggtagaagcatttagaccaatatggttactcctcaacaatttctggcaaactccatatacacaggagtacacaccgaacgacaggttcagtttggcttttgtgcgtttaatagaatattaaggcattatactatatgggcattcctccccctaatgccgagatgttctaaaaagcatacatataaaatccccaaccacaataatccagttgtggccaatgtatgctattgtggtgatttatttgggaaatcttacgcacattacagataggggttttatgcagtgagctttgaacttagattaatgtagtggcatgaatactacatatttgtccttcaacatgaagggttagtctcaacatccagcaagacacacaacaacaagttgcttcctggttacaattctaccaacttattgttattattaccaaatgcacagtcaatcattaagatttagactaatgtgcacaacactattttatccataaggatccttcaggggctcatgcatatcattcgtcgtttggagccattagctgacttcagatcaacaagtaaaatgaccatcagggtctagcgctcacaaggatattcactggttgtattgtgctttgaggcacataggaaaaacgtgtgtgtttatattggtagtaaagtgcacgacatcaggccaatgctgccaagcagagatttttatgtgcagaaatgtatagtccagctcattttatcattgcccatggtttacccaattactcataccattctgaaattgggtatcgatttatgcaacatttttaggtataataattttgagagagaacttataacaataattaattatttgtggtgttgtcagcaaggcaaacatttctcttcttattatataccaaattgttctatatagcattatttcgattcattgttcagcaaaaagagaagctttggaatagaacagacaaggccaagaattccttttatctgggaaaaatcatctgattcgtaagcttttgacaaagcaaatggagaaaattgattggcaagagcgaaagaaataccaatatccgtctaggacttttcttcaacaacagataatactactctcatacgaaggagtcatcaggactagggagaatacaacaggtctccataagacctttgtatttctatcacaaattaccatcactgacagtattgcggtcgagaattgtggctcttccaatgccaagaatcaaggacaaattaatgcctaatgtaacttcaagctctatggtgatgtgggattccatggctatttttgtactcttcttacttctggtagatcagatatagattatggtaagcatgctaaggggtggaatacaatgtagttctgcttaataaaccccagatctatgtctattcagaattgacctttaccatttggtttatagtatataccataccagtcaaaggactatcccaagtcaattcagcgactataagtatttaaattctgagagatgtatgcaacacaagcatagaggtcctagataggccgagtaaagtggttcgacgagaacacacaatgttttttcacaccaacatagtgaaaattttctcagaataacctatgctcgcaatctctgtgttgctaggggttacatgcccttttatcttagaatttgcttcatgtcgttcagcgacaaagagagcaatgtgtcaacaactggttgagaaatatatgactgaaatttctagcctttatttgtttggcaaggtcatattgcttactaatagaatctcaatttgtgatgtcttctgtaccaaaaaggctttcatgcatcatattatataccttcgggttacttcgagtaaaactttatgcatgaggagagagcagagaattaacttatctgtgttttattgtatttcaatttaatttcctagatttccaagcactatggagcttgatattgatatagttgatatgaccacttggcgatatataaatatatgatgccacaaaacacaaacaaagtatagggccaaacaaaaatgtttacgaaggttgcgcgacaacgtaatctcaggagctcagataacccaccacattttgcgggagtacaagctccagcgtatctggtgtcaatgtgtgtgcagccatcagggctatgacaacacaacaaaccttcgtaataagcacaacaggcacaattctggctcggtaatcggggtacacgataagtccacgcaacatgcgcaacaagcgcaattggtgctcaatgatcacggcaggcggacaatgcctacagggcatgcaaaaaaatacacgactcggcggtggcggtccgactcaacgagagcggtccaattaagcgagagtgcaacacagcaatcacatgatgcagccaagttcgtacgacacaaatactgtatcatgttgccagggcgtagccaatgccaaaactcatccaattaataacgtagcctgatcggcgcgttcgagtacccactatacaatttaatcgctcggcatgagtctgaagctcaacgcaacacaaatatttagagcgacataaaaatgtgcaacataaccttcacatgtatttcaaataattttctgctatttactactggaaataaagctgaaaaataatactaaaattaatacacgaacataagcacatctagtgcaaaaggtatttcctcattttgaagcatgtcttttttctactaattatttactacaggaaataattaattaatatataaactaactttattctacttgttatttgcaataggaaataaatagtataagtaacatagagcatgcataaaaattgtactaaagctgattaattcaacatgaattttttttctagccgccactaccacaactcatttttattattagccgactctttcatgtttgtccgtacatgccgaacggtgaccgttctcacggcatgcaagcaacatgcgcaacaaatcaaagggctgcatctgcatgtaaccgctttgaccgcagcgcttttaactggatgatgacgcgccatgtgggctggtcggtggcgttgcacgcctggctgtgtagtgcacgtggtgggcggcacgtggagcccggctgcggataggagcgggttgccaacagcgcggagggcggctagccggcggtagtgcgcagcggcatgcgagcggtggccgacgactagttggtcggtgcgcagggagtggcggcagcaggccgacagcttagaatctgcgaggggggtctacgcccacatgactcgaggtctggcgtgggcgcggtggtgacgctcgcttggggcgcgtatcgactggacgccgagaattggtagtagccatggccttcggggctggaggtgccggaccgtgacatcttccacgcggtttatattggcatggtcgctggcaagccgtagcgcgctggtgtcagccctattttctcctttctatgtgaatctcaattctcaatagaagattcttttcttccatcctcaatgaaagcaacagattcaatccacttgaaatacataccgctcgctcgattacgtagaggaggaattgaagcctatcgcgtgggacagttcggctaggccagtgacctgtcagcttgacgaagagttgatgcagatctgatctcgtagcaacgtcgaggtagagcgtgctgataacgtgttgagaactacgtcatcacggatcaccagatccgctccctttccctcccgtcagcagtagaggcgcgagaagttgtaaagaacccgtctcttttcttagaagcacgacagagtaacacacgagacacatgatatagggttgggcctctggcctctttctcttctctgtattatgagggagtgtacatgttccttatatagagatgtgagacccctcaggggcaaagcaggtatttgcccacataaccctaactagggttacttaacagatggtagatgggatcaagctggtgctggtgtctggctgtagcggtcggtggtgcaggcatgcaagggccacgacagcggggcacgcagggacaaagatggttgagggagcgcgagcgatgcgcgcctacgacatcacgggccagacttactgcgccgccgatgatagaagagagcgcgtgggcgaacgtcgactatctttggctagcgatggtgtgtgggggaggtgaaagtcgcctagaggggggtgaatagggcgaaactgaatattacaaagttaatcacaactacaagccgggttagcgttagaaatataagcgagtccgagagagagggtgaaaaacaaatcgcaaggaaatgaagagtgagacacaaggatttgttttaccgaggttcggttcttgcaaacctactccccgttgaggtggtcacaaagaccgggtctctttcaaccctttccctctctcaaacgaccacttagaccgagtgagcttctcttctcaatcacacgggacactaagtctccacaaggaccaccacacaattggtgtctcttgcctcggttacaattgagtttgtcacaagaaagaatgagaaagaaaagaagcaatccaagcgcaagagctcaaaggaacacaagtcactctctcactagtcactattgattggaattgaactagagacttgggagaggatttgatctctttagtgtgtcttgtattgaatgttatagctcttgtaatgtgtagaatgttggaaacttggatgccattgaatgtggcgtagttggggtatttatagccccaaccaccacaatgtggccgttggaagtctgctgtcgcatggcgcatcggacaatccggtgcgccaccggacactgtccggtgcgccagccacgtcagccagccgttggggttcgactgttggagctctgacttgtggggcctctgggctgtccggtggtgcaccggacaggtcctgtagactgtccggtgcgccaactgcgcgtgctctgacctctgcgcgcgcaggtgcgcattaaatgcgttgcagtcgaccattgcgcttgaagtagccgttgctccgctggcacaccagacagtccggtgagccaccgaacactgtccggtgcatacaccggacggtctgatgaattatagcggagcggcctccattttcctgaaggtagcgagttcagcgtcgagttccctggtgcaccggacactgtccggtggcacaccggacagtccggtgcgccagaccagggcacacttcggttgtctttggctctctttgtttgaaccctttcttggtctttttattggtctattgtgaacctttgtcacctgtaaaacttataatctagagcaaactagttagtcgattatttgtgttgggcaattcaaccaccaaaatcaattaggaaaaggtgtaagcctatttccctttcaatctccccctttttggtgattgattccaacacaaacaaaagcaaatatagaagtgcagaattgaactagtttgcataatgtaagtgcaaaggttgtttggaatgaaaccaataaatattacttactagatgcgcatggatgtcttttcttcttattaacattttggaccacgcttgcaccacatgttttgttttgcaaaatgttttggaaattcttttcaaagttcttttgcaaatagtcaaaggtaaatgagtaagattttgagaagcattttgaagttttgaaagtttttccccctgtttcaaatgcttttcctttgactaaacaaaactcccccttaatgaaatcctcctcttagtgttcaagagggttttagatattaattttgaagagggtatactaatttgaaattatatcaaaataagatactaattgaaaaaacttcaccaattaatagactctaatttttgaaattggtggtggtgcggtccttttgctttgggctaatactctctccccctttggcatgaatcgccaaaaacggatatttgagtaaaatataagcccttttaaactactctctccccctttggacgaaaataaaggagtgaagattataccaaagttggagagttgtgtggagcgacggcgaaggatgaatgattcgatggagcggagtggaagccttgtcttcgccgaagactccttttccctttcaatctatgacttatcatgaaatggacttgaaagaacacattagtcatagcacatgaaagagatgatcaaaggtatacatatgagctatgtgtgcaaaacatcaataaaagttcctagaatcaagaatatttagctcatgcctaagtttggtaaaagtttgttcatccaatggcttggtaaagatataggctaattgttctttagtgctaacatatgcaatctcgatatcccccttttgttggtgatcccttagaaaatgataccgaatggctatgtgtttagtgcggctatgctcaatgggattatccgccatgcggattgcactctcattatcacatagaagaggaactttggttaatttgtaaccatagtccctgagggtttgcctcatccaaagcaattgcgcgcaacaatggcctgcggcaatatactcggcttcggcggttgaaacagccacagaattttgcttctttgaagcccaagacaccagagatcttcccaagaactggcaagtccccgatgtgctctttctattgattttgcaccctgcccaatcggcatcgaaataaccaattaaatcaaacgtggatcccctggggtaccaaaggccaaacttaggagtataaactaaatatctcaagattcgttttacggccctaaggtgagcttccttaggatcggcttggaatcttgcacacatgcatacggaaagcataatatctggtcgtgaagcacataaatagagtaaagaacctatcatcgaccggtataccttttgatctacggatttacctcccgtgtcgaggtcgagatgcccattagttcccatggtgtcttgatgggcttggcatccttcatcccaaacttggttagaatgtcttgaatgtacttcatttggctaatgaaggtgccctcttggagttgcttgacttggaatcctagaaaatacttcaactcccccatcattgacgtctcgaatttttgtgtcatgatcctactaaattcctcacatgtagattcgttagtagacccaaatataatatcatcaacataaatttggtatacaaacaaatcatttgcaagagttttagtaaataaagtaggatcaacttttccgactttgaagccattagcaataagaaaatctcttaggcattcataccatgctcttggggcttgcttgagcccataaagcgccttagagagtctataaacatggttaggatactcactgtcttcaaagccgggaggttgctcaacataggcctcttccttgataggtccgttgaggaaggcactttttcacgtccatttgataaagcttgaagccatggtaagtagcataggcaagtaaaatgcgaattgattcaagcctagctacgggtgcataggtttcaccgaaatccaaaccttcgacttgtaaatatcccttggccacaagtagggctttgttccttgtcaccacaccatactcatcttgtttgttgcggaagacccacttggttcctacaacattttggttaggacatggaactaaatgccatacctcatttcttgtgaagttgttaagctcctcttgcattgccatcacccaatccgaatctcgaagagcttcatctaccctgtgtggctcaatagaggagacaaaggagtaatgctcacaaaaatgtgcaactcgagatctagtggttaccctcttatgaatgtcgccgaggatggtgttgacggggtgatctcgttgaattgcttggtggactcttgggtgtggcagccttgcaacttgctcatcctccttgtcttgatcatttgcatctcccccttgatcattgtcgtcgtcttgaggtggctcatcttcttgatcttcttcttcatcactttgagcctcaccctcatcttgggttggtggagatgcttgcattgaggaggatggttgatcttgtgcttgaatgggctcttcggattccttaggacacacatccccaatggacatgttccttagcgcgacgcatggagcctcttcatcatctaattcatcaagatcaacttgctctacttgagagccgttagtctcatcaaacacaatgtcacaagaaacttcaactagtccagtggacttgttaaagactctatatgcccttgtgtttgaatcatatcctagtaaaaagccttctacagccttaggagcaaatttggactttctacctcttttaacaagtataaaacatttgctaccaaagaccctaaaatatgaaacattgggctttttaccggttatgagttcatatgatgtctttttgaggatgtgttgatggcgtagcaggtggtgttgaccgcctcggcccaaaacctatccgaagtcttgtactcatcaagcatggtcctcgccatgtctaatagagttctattctttctctccactacaccattttgttgtggcgtgtagggagaagagaactcatgcttgatgccctcctcctcaaggaagccttcaatttgtgaattcttgaactccatcccattatcgcttctaattttcttgatcctcaagccgaactcattttgagctcgtctcaagaatccctttaagatctcttgggtttgagatttttcctgtaaaaagaatacccaagtgaagcgagaatagtcatccataataacaagacagtacttactcccgccgatgcttatgtaagcgaacgggccgaataggtccatgtggaggagctcaagtggcctgttagtcgtcaggatgttcttatgtggatgatgaatgccaacttgcttcccggcttggcatgcgctacaaatcctatctttctcaaagtgaacattggttagtcctaaaatgtgttctccctttagaagcttgtgaagattcttcatcccaacatgtgctagtcggcgatgccagagccagcccatgttagtcttagcaattaagcaagtgtcgagttcagctctattgaaatcaactaagtatagctgaccctctaacactcccttaaatgctactgaatcatcacttcttctaaagacagtgacacctacatcagtaaatagacagttgtagcccattttgcataattgagaaacggaaagcaaattgtaatctaatgaatcaacaagaaaaacattggaaatagaatggtcaggagatatagcaattttacccaatcctttgaccaaaccttgatttccatccccgaatgtgatagctcgttggggatcttggtttttctcgtaggaggagaacatcttcttctcccctgtcatgtggtttgtgcacccgctatcgatgatccaacttgagcccccggatgcataaacctacaaaacaaatttagttcttgtttttaggtacccaaatagttttgggtcctttgacattagatacaagaactttgggtacccaaacacaagtctttgctcccttgtgtttgtccccaacatacttggcaactactttgccggatttgttagtcaaaacataagatgcatcaaaagttttaaatgaaatgctaggttcatttgatgcactaggagttttcttcttaggcaatttagcacgagttgattgcctagaactagatgtctcacccttatacataaaagcatgattagggccagagtgagacttcctagagtgaattctcctaattttgtgctcgggataaccggtagggtacaaaatgtagccctcgttatcctgaggcatgggagccttgcccttaacaaagttagacaattttttaggaggggcattaagtttgatattgtctcccctttggaagccaatgccatccttgatgccagggcgtctcccactataaagcatactacgagcaaatttaaatttttcattttctagctcatgctcggcaattttagcatctaattttgctatatgatcattttgttgtttaattaaaatcatgtgatcatgaatagcatcaatgtcaacatctctacatctagtgcaaatagaaacatgctcaatagtggatgtagagggtttgcaagtttttagttcaacaatcttagcatgtaaaatgtcattttcacttctaagatcggaaatggaagcattgcaaacatctaagtctttagccttagcaatcaatttttcatttttaatcctaaggctagcaagagaggcattcaatgtttcaatcttagcaatagaaatagcatgattatttctaagattgtcatatgaatcatcacaaacatttgaatcaaccttagcaattaatctagcattctcatttctaaggttggcaatcaaatcatggcatgtgcttagctcactagttaatttttcacatttttccatctctagagcgtaagcattcttaaccttaacatgcttcttattttccttaattaggaagtcctcttggctatccaagagttcatccttatcatgaatagcgctaatcaattcatttaacttctctttttgttccatgttaaggttggcaaaaagagtaaacaaattatcctcctcattactagaattgtcttcatcactagaggatgcatatttagtggaggatttagatttaaccttcttccttttgtcgtcctttgccatgaggcacttgtggccgacgttggggaagaggagtcccttgttgacggcgatgttggcggcgtcctcgtcggaggaggagtcggtggagctctcgttggagtcccactcccggcaaacatgggcatcgccgcccttcttcttgtggtacctcttcttctcctttcttctccccttcttgtcgtcgcccatgtcactgtcactagagataggacattttgcaataaagtgaccaggcttaccacgcttgtagcaaaccttcttggagcggggcttgtagcccttccccctcctttgcttgaggatttgtcgaaagcttttgatgattaaagccatctcctcattgttgagctttgaggcgtcgatggggagcctacttggtgtagactcttccttcttctccttcgttgccttgaatgcgacgggttgtgattcgggcgtggaggaggtgccttgctcgatgattttctttgagcctttgatcattagcttaaaacttacaaacttccctataacttcctcgggagacattagcttgtatctaggatcacctcgaattaattgaacttgtgtagggttaagaaaaacgacggatctaagaataaccttgaccatctcatggtcatcccattttgtgctcccgaggttgcgcaattggttcaccaaggtcttcaagcggttgtacatagcttgtggatcctccccttggtgaagcatgaagcgaccgagctccccctcgatcgtctcccgctcggtgatctttgtcacctcgtctccttcgtgcgcggtcttgagcacgtcccaaatttccttcgcacttttcaatccttgcaccttattatactcctctcgacttagagaggcgaggagtatagtggtggcttgggagttgaagtggtggatttgggccacttcatccgaatcatagtcttcatccccaatggatggtacttgtacaccaaactcaacaacattccaaatgcttgtgtggagtgaggttagatgatgcctcattttgtcattccacatattataatcctcaccgtcaaaaaccggtggtttgcctaatggaacggagagtaaaggagtatgctttaaaatacaagggtagcgtaggggaatcttactatacttcttgcgctcatggcgcttagaagttatggatggcgcgtcggagccggaggtggatggcgatgaagaatcggtctcgtagtagaccactttcctcatcttctttttcttgtcgccactccgatgcgacttgtgggaagaggattccttctccttccctttgttgcgggactctcccgatgaagccttcctgtggcttgtagcgggcttgtcgccggtcaccatttccttcttggcgtgatctcccaacatcactttgagcggttaggctctaatgaagcatcgggctttgataccaattgaaagtcgcctagaggggggtgaatagggcgaaactgaaatttacaaagttaatcacaactacaagccgggttagcgttagaaatataagtgagtccgagagagagggtgaaaaacaaatcgcaagcaaatgaagagtgagacacaaggatttgttttaccgaggttcggttcttgcaaacctactccccgttgaggtggtcacaaagaccgggtctctttcaaccctttccctctctcaaacggtcacttagaccgagtgagcttctcttctcaatcacacgggacactaagtccccacaaggaccaccacacaactggtgtctcttgcctcggttacaattgagtttgtcataagaaagaatgagaaagaaaagaagcaatccaagcgcaagagctcaaaggaacacaagtcactctctcactagtcactattgattggaattgaactagggacttgggagaggattttatctctttggtgtgtcttgtattgaatgctatagctcttgtaatgtgtagaatgttggaaacttggatgccattgaatgtggggtggttggggtatttatagccccaaccaccacaatgtggtcgttggaagtctgctgtcgcatggcgcaccggatagtccgatgcgccaccggacactgtccggtgcgccagccacgtcagccagccgttggggttcgaccgttggagctctgacttgtggggcctctgggctgtccggtggtgcaccggacaggtcctgtagactgtccggtgcaccaactgcgcgtgctctgacctctgcgcgcgcaggcgcgcattaaatgcgttgcagtcgaccgttgcgcttgaagtagtcgttgctccgctggcacaccggacagtgtccggtgaattatagcggagcggcctccattttcccgaaggtagcgagttcagcgtcgagttccctggtgcaccggacactgtccggtggcacaccggacagtccggtgcgccagaccagggcacacttcggttgtctttggctctctttgtttgaaccctttcttggtctttttattggtctattgtgaacctttggcacctgtaaaacttataatctagagtaaactagttagtccaattatttgtgttgggcaattcaaccaccaaaatcaattaggaaaaggtgtaagcctatttccctttcaggaggcgtacgtgagagggagaggtgaaaaggaacaacgcgtataccagataaggtcccacagcctaagtaggtagccttctaatatctctactaactattaaggagagagtgtagactgcccccgctccctacccaacgccccccgctacctgttcaccgcgcgccagcgaaacctccgcacgcccactgcccatctgttccccgtgcgccagcgaaacatccgcacgcccgcggcccgcctgttccccgcgcatcccgctgcacgacttctgctaccgcaacggccacccacgcacgcccgcctgttcaccgcgcatcccgctgacctccccttcacgctcgcacacgctccgttcccccaccccaccgcaatccccgacgctataagagcggtaaccaactccatctccctggtgccacgcattgttgagttcttaaggtgcgtttcgttgaggacttgttcatttttgttggtcatgtattccattttactgctctaccattttgtggaataaagggaggaatgttttcactagaagagttcatcaatcttatgttggtttcttggatcagttttgctctatggctaaatggtcgaattgagcctatttcattataaagttagcgagcgaataattgttcagcctcttcctagaactcattaccagtagaatcagttactaactgcttttctttttcttggattagaatggctggggctatctctcaccatgcgctagcattttcacaatcccactggtgcagtgcgaagaactctagattcggaaagaggacgggcaatgctcgcctggtttatctaaaaggaagatgtggttcaggcagcagaaaactgggtttgatgtgggcctcgagctcgcagtcttctgtcatggagccgacgcacctaccatctgatggcaacagcagccacaccccaaaaaaatcaagtaattttaacgacctcctatggtggttatttgtttttaatttgagaaaactatccatttgacacatttaactttgggcttctcagaatttgggggcatataataagatctgctaatctgttatctctatgtcgttgtaggtgaaagcgctcttatattgatttggcatggtgaatccctgtggaacgagaaaaatctatttcctggctgcatcgatgtacccctgacaccgaagggtgttgaggaggccattgaggcaggtaaaaggatatgcaatatcccaatcgatgtgatatatacttcatcactgatttgtgctcagatgaccgcaatgcttgccatgatgcagcatcgacgcaagaaggtttgtgtctttcctttgaaattccagtaatttcttctagcatttgtatgaacttgccggagaaatcatgctttgctggtgatatatgtatttatagatcctagttatcacgcataatgagagtgaacaagctcacaggtggagtcagatatacagtgaggagacaatgaaacagtccattcctgtcatcacagcttggcaattgaatgaacggatgtaatactttctccatactctttgatttgctaattactccctctgtctcaaaatagtattaattttagctcttgatttttatgtctatattcaaatagatgatgataaatctagattctagacacaaatataaaacatatacatcaagtattatatgaatctattaatttactaagaccaattttaatttgggacagagggagtatacgattataatagttgtttgactgtgcttctctttaaatatcccttgacatttctaggtatggtgagctacaaggccttaacaagcaagaaactgtagatcgatttggcaaagaacaagttcatgagtggcgccgcagttatgatattcctccgccaaatggagaaagtctagagaagtgtgctgagagagctgttgcttatttcaaagatcaggcacatctagcaaggccactttacactaattgaaagatacactttttacttgggttattggtcttgctgcagtattggtatgcatgctaaaggttattcttgaatcgatgaattcctctactatgggatgcagaaatgcatgtgcttagttttctttctattgtgctagctcatatcaaatttataacctgaattttttatttatgttcgactctaaaaaacagttttttctagctcgatttgacctatagtaatttttccgtaatagattattccacaacttgtggctggaaaacatgtgatggttgctgcacatgggaattcacttcgttcaattataatgcatctggacaaattaacttctcagaaggtaattcactgtcgtttttgtctttccatcaaaaaggactcggctaaacagaacatgtagcattatgttaagtttgggagtgagcctttcgtcccttcaggtaataagccttgagctgtctactggcattcccatgctttacatattcaaagagggaaagtttattcgacgtgggactccagtaggaccttcggaggccagtgtttatgcttataccagggtaagattctttcccccacatgttctaccataggacgatactccagtttacaaaccttatctgtacagaccaaacgatttgctgagcacattacatttcagaacaaattggcctagaagataaggggtgtttggtttgagaaatcactctattcaaaatgagatggtgtatcatgggtccatttctcaaatttggtgggatgaccctattcctcatattagtactaactaggtgagtgtccgtgcgttgcaacgggaacatataataacatgataacttatatacaaaatgtgtcttatattgttataagaaaatgtttcataatccatttgtaatcctggccatacataaattttgttattttaatttagctgtttcactactacattgcaaccatcagtatcatgcagacttcgatatatgtcacgatttgcatagtcttatcattgaagagcacgtgtcacacctaccggtagaagttccctcgtacattgtcagggggacctcatggtcgtcgctaaagccggcgactctctggttgttctgggcaccgcatccgacgacaacaccgtcacgctgtccagctcatcatccacctgaagatcaacctgccacgtaagtcggtagtgaccggccatgaattcttgtgcgctggggcaacgggcgttgcattccgttgtgtgagtgttttagaacaagatgtatgtaaaggagtagcacatccggtggtgcaatggctaggtgtactacctcgctgatgagctcgcggtgcacttcgtttagcagcccagccaagagtcatcggtacttgccatgtcgtgcgtgttcgacgactactatatcaaggactgtggcgtcctcttggcgccagaggtgaggagtaccgacagcaatgacctctcgccatcgtcggggtagcttttgtgctggcccgcctttaattctcttcgtaaacacatacacttgccttttttgtttaagcaagtgagtatagtggtgcgtacctgatgactgacaatgtacgaggaaacttctactggcaggtgtggcacgtgctcttcaatgatgagaccatgtaaatcgtgacatatatcgaagtctgcatgatactgatggttgcaatgtagtagtgaaacagctaaattaaaataacaaaatttatgtatggctaggattacaaatggattatgaaatattttcttataataatataagacacattttgtatataagttatcatgttattatatgttcccgttgtaacgtacgggcactcacctagtaaggcttatgttcgatagctaagaccgttcacaacgcatgcctctatctctcccctacgcgtgcatggcagctataggattatcctaagggctagtttgggagtctaaataccgaaggggattggagggactaaaatcctctccttattcaaaattgaataagaaaataactttaacccctccaatcccctccggtatcgtggctcccaaactagcgctaagagctgcagggccctcccctacatagccccctaggcggtggatgtattctctctcccgccagttttgcagtgtcctcctcccactgatgattatgggtgtcacgacgtgataaggtacaagaagaaatagcaaaggaggaaaaagagaaggcattatagttatttatttttgtttgtctacaatgtgaagtagtggcaaatagatcaaaaacggttttaactttatcggttgagttattcatggaggtaaaaaaccggcttcacgtgaagttatactaagagggtgtttgaatagaactaataattaattattaaaattagttaaagagatacttttagcaaattagcaaataattagctagctaaattgtcaaatacgaaaactaaaaatacgaaattagctagctaaaatagatttttagggactaatttttagtcattatattttatttcgttttagtccctaaattgtcaaatacgaaaactaaaaatctattttaattttgtatttggtaatttagggactaaaatggaataaagtgagagactaaaaattagtatctagaaaccaaacaccccctaattatactagcaattttttagtcaactaactattagctctagtacattcaaacacctccgaccctaaagctgaattataccaaacggggcctacatctcccagtttaaaattaagggtgtgtttaaatgcactagagctaatagttagtttactaaaaataattgttaatggaattagctagctaactattaactaatttactaaaaatagctaatagctgaaccatatcatatgcaatcaaccgatgtgctacattacaccttcgcttggctcaaatataatccgcaccagcttctactacttctaccgtgttttgtctctatggattacagctacaacacagtctgaacgctggccttaatctaaagtgaacaacctaagtgctacagattatttggatgtctccagctaattatagccgctaataattatctctagtgcattgaaacaaccctaagtgctatatggtttattgtgattatacttggcataatccgtttcttcataaatagtatatgtggacagcttcaaaatacattgcaatggacaaatatctcttccctatatcccttgcgttaaattttacatatatctcttatttagtagtggttgtatgcaaaaatacgcgcgctagttcctatttgtcactccaaaaaggggcagcacgtacgcagtgcctatatatgtacacaatcgatctatcattgcatcttcctcagctcatcactactcacactcatccataatcgattgaaaattgtgtccgtcatttgttggtttgatgataattctttcattcgtggcctcaatgagtatctagttcattaatcgatcaattgggtgtgtgcttggtcaaaggcggcaacggtgagctactcatcaaggcgtccatgcaacacatgcagcacgaaggcgatggccgggagcatggtcgatgagcccgtcgtgttgaaccgagggtgacagtgataacggtggacagaggcgccatctggggtctcatctcgggaaccatcctcaccttcctcgaggccatgccgtaggagttggacgggacgaaggcaaggctcgcggactacttcgactacatcactaggaatagcaccgatgagatcatcaccgccatgttcatcgggaccggcaaaaacaagcggtctctctacgttgccaaggacatcaaccacttctacatggagaacagcccacatgtcttccctcaaaagtgaattccatctggcgtcattgttcttgcatccatccatcatagtcctctatacattgatgtgattagggcgatgtgaatggatgcaagaacaagtggttgatgttcttggcaacgtagagaggccgcttgtccttgccgggcgaagtgagcagcgtgatgacgagcccaccggtcctggcgatgtagtcgaagtagtctgcgagcctcgcctccagcctgtccagatcctgcaccctcgcctcgaggaaggcaagaatggtttccgggatgagaccccggataccatcgccatccatcatcagcaccgtcaccctctacccccctccccccccggcacgatggtcttgtcgaccacgatcacgtccatcgcctttgtgctgcagccattaaatggacgccgcgataagtagctcaccattgtcgccttcgacagaacacacattggattgatggattaatgagctcgatacttgtcgaggccagaaatgaaagaattatgatcgatccaacgagatgatgaacacaattttcaatcaattgcggttgagtgactagtgatgagatgaggaggaggcaacaatagatcgcttgcgtatatataggcccagagtatgtgcttccccattctttgagtggcacataggaattggcggcgttctgttgcatgcaaccactactgaaacagtgttccactagtggttgtccgcttcttgattcttctttactaagtaaggagatatggaaaattcaacgcaaggtatgaaggaaacactagtacagagaagttctatagtggcggttgtaaacgtatttatagtggcgtttttcgtaaccgccagtgctaggggccagtagaaatcatcatttttacaggcgggtaactgaggaccgccagtgcaaatcgtttccaggaaacataaaaaatattttaaaaatagttaaaaaaaatttatttttattaggggacctcagcccaccccatccgccagtctttatttttattagcaagtcgcggcatttttcacgcaaaattcgcgcgctacgcggttgttagtattcgaaccgtcgacctcaccctcgcgcgtaccctcccctaccactccgtctatgacatgtcttgtatctagtttgtagttgttttctccacatattacaaccatttgagtgtaaattgcttatttgagaccctaaacgaattcaaataaaaaagttgtcaactacaaagataaataacttttgatgttctacaacttttattttgacacttttttcatccgaggtagtttgcaaaatttgaattttaaatttgacatacttagattcaatttttgagaaccgaaatgagttcaaataaaaaagttgtcaactacaaagtttcataacttttagagatctacaacttttattttggtggttttgtcatacgaggccgtttgaaaaactcgaaaaattaagaataaaaatgatttctagtggcggttttcttaaggaaccgccactagaaataacacagtcggtgcttaaccgaatccgcctgtaaaaatatatcgtccccgcaggctttgagcctttttctactagtgaaagagatattcgtccattgcatgttattttggagtggcccatatactatttataaagaaacaaataatgtcgagtctaattcatctttaatattgcttcactagcgaatctggtttttttagctcagtgaacaactcgatcgataaagttgaaactgtttcgatctgcttagcaaaacagcttcacattgtagaccaaaaaataactataacgcgttctctgttttcctccttcacgagcagtgctggaaatataagcccagctttttggccaacactagcacggcctaaaaaaaagtccaaagcacagcttagcacgaaataatatgaatcagactagtacagcttgaagtcagatctaggtcaaacctcaaattttgacttatcgggctctcggcatagcccacatgcaggggtcgagcttgggccagcacgacccaatgaagttcatattgcttaatttctttaatttagtaagttatatactttatgttattgtaatatttgtaatttatatggtcaaatgatgctatgttacaatgtcacaaataccttaagtgctttgactcatcaagattacaagggcaaaatataacccaacctctcaaaaagctcttaagtactagacctaaacaaacactattcaacctctagttgtttatactatatatgcctttcatataaccattgaagccactatagtgacagtgaatacactatactcactattggtagaggtcgacacccacaccactacactataactattttcataattagctagaaaaccttatgttggggatttgaccttggaaacagagtccttgacgttttagagttgattgagaattattttctctttaattgatatatgttttcaaaagcatcctcattttaagataaacaaatatattgtgaaaacaaccttgttcactccgcccaagcgtgaagacaaaacaaggatatcaaagtcagttggctctctttcctaagatgattgaacaaagccactgaacatacttcattgagaagcgaagctagaagtgaatgaaggcatatcgattcattcttgggatgcaaagcctctccaccaaagattatgtattgagaagaagcctaaagtatgtgtttagtataaaatgaccaaatttcccttgtatgaggaaatgatcgtaattcatttacttaggggtatttttgactttgtatatggaataaaaaaagatgatgccctctataaatatccctatgatatgtactattaaattacatataaaacaacttgatcaagttgattttgttaacctaatgctcgtgtgaattctttcaccaacatacggcgcccattgttcgtgtgtgctcaaaaaacttcacatctataacaacacaatggctagacatggaaataaaaatcacacccaacgaaagtgaaaacatcttacctccaactaatgaagagcaaggcatcaaccaaacaactttgatccaaaatgaagctaaagataaaggattcaaaatattgcaagatcatctacatgaagagtagaaagagctcaaaaactattggatgagactaagagagaattcatttatgtggaaggtagaagaagccaaatctaccttatgatgtttagcagagagatccacattgtcaaccaagatttcctacatatcgatgacccaggttcgacaacaaaggcatcgcaataaagaagctataaaaaacatctgtctccattgactctagatctcccttgtcaacaatttttcaatgagcacaatgaactttgggttacaagttcaacatgctcccatcttatgggccttgaagcaacagttatgtctagtgaggcgccagagccacattggtgaactcacttgtaatagcaaataaaggactagctcaacaatgctactcttcactctaacaatctttgaagtttgttccaaaccactattcatacacaactttttcctagcatgcataaggatggaaaacccgagcggggataaaaatccttagtggaaatatgatgggacctagattaggagtcagaccctcccctcgtgcggcctatgaaggttgaatccattaaatcgtctcaatgtgaccccatataaagatgcaaaatcctcactcgctaatcttaacccttatttctttcactcactactgctctcccatgtgacaatccttgtttatgtgtttatatcataatatgtgttctcaattattgatccccataggttctcaatggtgattggacccttgacgtggatggggatggggatgaaatcctccatgttaagtatttgggggggatggtggggaatatgtttcggggatcgggacggggacaaggagcactccctaagaagaaactagctttagaactcaagttaaaagtagcaacagctacaaccaatagaaaacaagcaacatcgagagctcgcctccacctttgtatcaccaactaaatgagattgataacgataacacaacaattactgttgagagcaattaccaagagtgaaataactacaataaaagaacatttcatagtggatgggctatctagaaagggcaagaagagacatgactagtggaagaaaacatctaaggctcaaagacatgtttagcctaaaacctccattgacagactaggctagtggaaaaaagctctaaggctcaagggtgacaaagtaggcgttcttatcgtggcatacctcattgtatgtgatcaatgggcagccttgagtcctgtgtctgagggcacacttcgttcccgcacatggacattttcttcaagatgaacgaatagcagaatagggctatcaccaaccgttgggcatgccaactctgctccatcaggtgtgccagcccaatggggagcgcacttagtaagctctctcccccacatgggtagtggtactggtgggccctatgggttagatacagttcgtgaaacagtggcatgcagagacatgagcagtcttgtgggtaggaaaaaaaagaataaacaaatacatatatgagatttatttatttgagttcaattattttcccttctccactgcaaccccatctaatcggcgaatcgaatctatactgatcgttaaatacagttgtgtaccatgcagcctagaaagaaagtatcatttctcctttttctcattcactattatactttgatttatacattcatcagtatccaatctcagttttgcagattaaattaatctatgtgcgtattcgtgaattttactgtgtggtttcctttgaacccatatatcttctctattttaattctattttcgaaaattctcacgccataatcatgtcgcaaagtgtagatcgttttaaaagatcttttcaatctttgttctttatgctattgtattgttttatcttttcttgtgcttattacttgatatgtacaatgtatagacatcaattcgaatgtgttgggcgaagagcaagcttgggagggtcaagagcaagctttagaggaacaaggcaagtgacatttgaacagtcctataaattgaattcacttattacattgtattaatttgatcgctcttgttaaggatgactagccatgttttaccttcatataaaacattggatagatatattagtcttttgctagtactttacctagttatggttaatcttgattataactttacgtaacaatgctaattaaaacttgtttttagcaacatggcagcgagggcttgtacatagggttgtcatacgcaaagtacctcaccctaaggattggttcgccaagtaatcaccaagattttagtgtccaaccacaaagtctatatgggctctaagcttggccaaagtagacttaggttcttagatgtgtggatgcttacccgacatggtgcaagaaaggctctagggtatagtctgtcaaggtcaagtgtggtgcaaggttagatagctacccttcggattgagatctacactaacaaattgggtataaacctatagcgggctaaaaacatccaagtgactctataagaaatggccttgcagtgaaagtagatgtcgtggtttcgacccctcgacaagtgaacttgtacgttaggatggggtctgcgtgccactgttcatatggatttgctcttggacgagcctgagtaagagagtttacactaatttgaatagaactcctacatctagtatagtgaagtctttattgatgtttttatgtgttacaaggcagaatgcttgggtctcatgcttgtgtgaagaatggtatagatttagtgtgtctgccttctaatggcattcttatccccttatatagttgaggaacaagaaacttgttattacatggccgctttcaatgggatatgttactatcgtttttggacgcatcgccacgtgggtacattcctaaggtatgccatgatgagaacgtctacttttcacctttgacatgacccgtccatctttgagttgaccaggacatgagggtggttgggtcctgcaggtgttcgagctcattttttggggtatgcctctgcgattgttggggtgaaggcgaaacgtccccctcgctcgagaatctcacgccagcgtatttaatactgaagaccatgaaggccctaaagattgaaccacacagcgaagtgcctaaggacgacgcacacgcgaagacttaggcactatcttcaccctggctagccgaggcaaagactatcgaagacttcggaggatcggaggatctagaccacgaagaccacacgttgtaatcctccacattgtaaaagggggcccatgtcacacccggatttaagggacaaagccgggtgcatctcatacatgcgccgagaagacaacatatataataacagagtgtatagagataaatgtcacgatacatcagagtaattattacaaagcggaagacttattacaaaataaaaggataaatataaaacgaactaaggatcgttggcgccaatctcaactgagaaacgccacctagatcggatctgaaagtcgcctagagggggggtgaatagggcgaaactgaaatttacaaatataaacacaactacaagctgggttagcgttagaaatataatagagtccgcgagagagagtgcaaaacaaatcgcaagcgaataatgaagtgagacacgcggatttgttttaccgaggttcggttctctcaaacctactccccgttgaggaggccacaaaggtcgggtctctttcaacccttaccctctctcaaacggtccctcggaccaagtgagctttctcttctcaatcacttggaacacaaagttcccacaaggaccaccacaagtttggtgtctcttgcctcaattacaagtgagtttgatcgcaatgaaagaatcaagaaagaagaaagcaatccaagcgcaagagctcgaaagaacacaagcaaatctctctctctaatcactagggcgttgtgtggagtttggagaggatttgatctctttggtgtgtctagaattgaatgctagagctcttgtaagtagttgggaagtggaaaacttggattacttgaatgtggggtggttgggggtatttatagccccaaccaccaaactagccgtttggtggaggctgtctgttcgatggtgcaccggacagtctggtgcacaccggacagtccggtgcgccagccatgtcaccaaagccgttgggttccgaccgttggagctctgacttctgggcccgcctggatgtccggtggcgcaccggacatgtactgttgagtgtccggtgcgccagcatgggcgtgcctgacctctgcgcgcgctggcgcgcatttaatgcgacgcaggtagccgttggcgccagaagtagtcgttgccccgctgttacactagacagtccggtgtacaccggacagtccggtgaattatagcggagcagctgaaatgaattcccgaggctggcgagttcctgaggactctcttccttggagcaccggacatgtccggtgtacaccggacagtccggtgaattatagcggagtcgcctctggaatttcccgaaggtgacgagtttggagttggagtcctctggtgcaccggacatgtccggtggcacaccggacagtccggtgcgccagaccagaggtgcctttggttgtcccttgctcctttgtttgaacccaatacttggtctttttattggctaagtgtgaacctttggcacctgtataacttatacactagagcaaactagttagtccaatatttgtgttgggcaattcaaccaccaaaattaattagggactaggtgtaagcctaattccctttcaatctccccctttttagtgattgatgccaacacaaaccaaagcaaatataaaagtgcataatttgaactagtttgcataatgtaagtgcaaaggttgcttggaattgagccaatataaatacttacatgatgtgcatggattgtttctttgtttttaacatattggaccacatttgcaccacatgttttgtttttgcaaatccttttgtaaattcttttcaaaatccttttgcaagatagtcaaaggtaaatgaataagatttttgcaaagcattttcaagcttgagattttctccccttgtttcaaatgcttttcctttgactaaacaaaactccccctcaaataaattctcctcttagtgttcaagagggttttaagatatcaagttttgaaagtactacttgctccccctttagaacacaaagagatatcaatttgaaatttaccaatgaaaaatcatcaattttaaaattagggtggtggtgcggtccttttgctttgggccaatactttctccccctttggcatgaatcgccaaaaacggatacttggaatgagatataggccctttctagctactttctcccctttggcaaataaaacatataagtgaagattataccaaggatggagagtgatgcggagcgacggcgaaggatgagtagtagagtagagtggaagcctttgtcttcgccgaagactccaattccctttcaatatacctatgacttggtttgaaatacacttgaaaacacattagtcatagcatatataaaagagacatgatcaaaggtatatttatgagctatgtgtgcaaattagcaaaagaagttcctagaatcaagaatattgagctcatgcctaagtttggtaaaagtttgttcatcaagaggcttggtaaagatattggctaattgatctttggtattaatgtatgaaatctcgatatcccccttttgttggtgatccctaagaaaatgataccgaatggctatgtgcttagtgcggctatgctcaacgggattatccgccatgcggattgcactctcattatcacatagaagaggaactttggttagtttgtaaccgtagtcccgcagggtttgcctcatctaaagcaattgcgcgcaacaatggcctgcggcaatatactcggcttcggcggtagaaagagcgaccgaattttgcttctttgaagcccaagacaccaaggatcttcccaagaactggcaagtccccgatgtgctctttctattgatcttacaccccgcccaatcggcatccgaataaccaatcaaatcaaatgtggatccccgagggtaccaaagcccaaacttaggtgtataagccaaatatctcaagattcgttttacggccgtaaggtgagattccttagggtcggcttggaatcttgcacacatgcaaacggaaagcataatgtccggtcgagatgcacataaataaagcaatgaaccaatcatcgaccggtataccttttgatccacggacttacctcccgtgtggaggtcgagatgcccatttgttcccatgggtgtcttgatgggcttggcatccttcattccaaacttggttagaatgtcttgagtgtactttgtttggcaaatgaaggtgccctcttagagttgcttgacttggaatcctagaaaatacttcaactcccccatcatagacatctcgaatttttgtgtcatgatcctactaaattcttcacatgtagattcgttagtagacccaaatataatatcatcaacataaatttggcatacaaacaaatcattgtcaagagttttagtgaataaagtaggatcggccttgccgactttgaagccatttgcaataaggaaatctctaaggcattcataccacgctcttggggcttgcttgagcccataaagcgccttagagagcctataaacatggttagggtactcactatcttcaaagccgggaggttgctcaacatagacctcctccttgattggtccattgaggaaggcactcttcacgtccatttggtaaagcttgaagccatggtaagtagcataggctaataatatgcgaattgactcaagcctagctacgggtgcataggtttcaccaaaatccaaaccttcgacttgtgaataccccttggccacgagtcgagctttgttccttgtcacaacaccatgctcatcttgcttgttgcggaacacccacttggttcctacaacattttgattaggacatggaactaaatgccatacctcgttcctcgtgaagttgttgagctcctcttgcatcgccatcacccaatccgaatcttggagtgcttcctctaccctgtgtggctcaatagaggaaacaaaagagtaatgctcacaaaaatgtgcaacacgagatcgagtggttacccccttatgaatgtcgccgaggatggtgtcgacggggtgatctcgttggattgcttggtggactcttgggtgtggcggccttggttgttcatcctccttgtcttgatcatttgcatctcccccttgatcattgccgtcatcttgaggaggctcatcattttgttctacctctttatcaacttgagcctcgtcctcattttgggttggtggagatgcttgcgtggaggaggatggttgatcttgtgcatgtggaggctcttcggattccttaggacacacatccccaatggacatgttccttagtgcgatgcacggagcctgttcttcacctatctcatcaagatcaacttgctctacttgagagccgttagtctcatcaaacacaacgtcacaagaaacttcaactagtcctgaggacttgttaaagactctatatgcccttgtgtttgagtcatatcctagtaaaaaagccttctacagttttaggagcaaatttagattttctacctctcttaacaagaataaagcatttgctaccaaaaactctaaaatatgaaatattgggctttttaccagttaggagttcataggatgtcttcttgaggattcggtgtagatataaccggttgatggcgtagcaagcggtgttgaccgcctcggcccaaaaccgatcaggtgtcttgtactcatcaagcatggttcttgccatgtccaatagagttcgattctttctctccactacaccattttgttgtggggtgtagggagaagagaactcatgcttgatgccctcctcctcaaggaagctttcaatttgagagttcttgaactccgtcccgttgtcgcttctaattttcttgatccttaagccgaactcattttgagcccgtctcaagaatccctttaaggtctcttgggtatgagatttttcctgcaaaaagaacacccaagtgaagcgagaataatcatccacaataactagacagtacttactcccgccgatgcttatgtaagcgatcgggccgaataaatccatgtgtaggagctccagtggcctgtcacttgtcataatgttcttgtgcggatgatgagtgccaacttgctttcctgcttggcatgcgctacaaatcctgtctttctcaaaatgaacatttgttagtcctaaaatgtgctctccctttagaagcttatgaagattcttcatcccaacgtaggctagtcggcgatgccagagccaacccatgttagtcttagcaattaagcatgtgtcgagttcagctctatcaaaatctaccaagtatagctgaccctctaacacacccttaaatgctattaaatcatcacttcttctaaagacagtgacacctacatcagtaaagagacagttgtagcccatttgacataattgagatacagaaagcaaattgtaatctaaagaatctataagaaaaacattggaaatagtatggtcaggtgatatagcaattttacccaatcctttgaccaaaccttgatttccatccccgaatgtgatagctcgttggggatcttggtttttctcatatgaggagaacatcttcttctcccctgtcatgtggtttgtgcacccgctgtcgagtatccaacttgagcccccggatgcataaacctacaaaacaattttagttcttgactttaggtacccaaacggttttgggtcctttggcattagaaacaagaactttgggtacccaaacacaagtcttggaacccttgtgtttgcccccaacaaacttggcaactatcttgtcggatttgttagtcaaaacataagatgcatcaaaggtcttgaatgaaatgctatgatcatttgatgcaataggagttttctttctaggcaacttggcacgggttggttgcctagagctagatgtctcacccttatacataaaagcatggttagggccagagtgagacttcctagaatgagttctcctaattttgctctcgggataaccggcagggtacaaaatgtaaccctcgttatcctgaggcatgggagccttgcccttaacaaagttagacaaatttttaggaggggcattaagtttgacattgtctcccctttggaagccaatgccatccttgatgccagggcgtctcccattatagagcatacttctagcaaatttaaacttttcattttctaaattatgctcggcaattttagcatctaattttgctatatgatcattttgttgtttaattaaaaccatgtgatcatgaatagcattgatatcaacatctctacatctatcacaaatagacacatgctcaatagtagttgtagagggtttgcaagaattaagttatacaatcttagcacgtaaaatatcattgttatctctaagattggaaattgtaacattgcaaacatctaattctttagccttagcaaacaatttctcattctcatctctaaggctagcaagagaagcattcaactcatcaatcctagcaagcaaatcaacattatcatttctaggataggaagttgaatcaatacaaacatgagaatcaaccttaccaattaatttagcattttcatttctaaggttggcaatagtgtcatggcatgtgcttagctcactagataatttgtcacatttttctacctctagagcataagcattcttaaccttaacatgtttcttattttccttgattaggaagtcctcttgggagtccaagagatcatccttttcatggatggcactaattagctcattcaatttttccttttgttccatgttaaggttggcaaaaagggtatgcaaattattttcctcatcactagcattatcatcactagaggactcatatttagtggaggatttacatttaaccttcttcattttgccgtcctttgccatgaggcacttgtggccgacgttggggaagaggagtcccttggtgacggcgatgttggtggcgtcctcatcggaggaggactcggtggagctctcgtcggagtcccactcccggcaaacatgggcatcgccgcccttcttcttgtagtacctcttcttttctctcctctttcccttcttgtcgtcgcccctgacactgtcactagatataggacattttgcaataaaatgaccgggcttaccacatttgtagcaaaccttcttggaacgggatttgtaatccttccccttccgttgcttgaggatttggcgaaagcttttgatgattaaagccatctcctcattgtcgagcttggaggcgtcaattggttgtctactcggtgtagactcctccttcttctcctctgtcgccttaaatgccaccggttgtgcttcggacgtggagggttcatcaagctcgttgatcttctttgagcccttgatcatacattcaaagctcacaaaattctcgattacttcctcgggagtcattagtgtgtatctaggattaccacgaattaattgaacttgagtggggttaaggaaaatgagagatcttagaataaccttaaccacctcgtggtcatcccacttcttgctcccgaggttgcgcacttggttcaccaaggttttgagccggttgtacatatcttgtggctcctccccttggcgaagacgaaaacgaccgagctccccctcgatcgtttcccgctttgtgatcttggtgagttcatcaccctcgtgcgcggtcttgagtaggtcccaaatctcctttgcattcttcaacccttgcaccttgttgtattcctccttacttagagaggcgaggagtatggttgtagcttgagagttgaagtgctcgatttgggccacttcgtccgtatcatagtcttcatcccctacggatgatacctgtgctccaaactcaacaacattccatatacttttgtggagtgaggttagatgaaatttcattaaatcactccacctagcataatcttcgccatcaaaggttggcgatttgcctaatggaacgaaaagtaatggagtagatctagatgtacgaggatagtgtaaggggatcttactaaacttcttgcgctcttggcgcttagaagttacggatggcgcatcggagtcggaggtcgatgttgatgaagtgtcggtctcgtagtagaccactttcctcatcctcttgtgcttgtcgcctttccgatgcgacttgtgagaagaagatttctccttcttctctttgtggtgagacgaagaagatcttttctccttccgtttggaggagtccttcttcttctccttcctcttggtgcgggactcttccgatgaagtgctcccttggctcgtagtgggcttgtcgccggtctccatctccctcttggtgtgatctcccgacatcacttcgagcggttaggctctaatgaagcaccgggctttgataccaattgaaagtcgcctagaggggggtgaatagggcgaaactgaaatttacaaatataaacacaactacaagccgggttagcgttagaaatataatagagtccgcgagagagagtgcaaaacaaatcgcaagagaataatgaagtgagacacgcggatttgttttatcgaggttcggttctctcaaacctactccccgttgaggaggccacaaaggtcgggtctctttcaacccttaccctctctcaaacggtccctcagaccgagtgagctttcccttctcaatcacttggaacacaaagttcccacaaggaccaccacaattttggtgtctcttgcctcagttacaagtgagtttgatcgcaatgagagaatcaagaaagaagaaagcaatccaagcgcaagagctcgaaagaacacaagcaaatctctctctctaatcactagggcgttgtgtggagtttggagaggatttgatctctttggtgtgtctagaattgaatgctatagctcttgtaagtagttgggaagtggaaaacttggattacttgaatgtggggtggttgggggtatttatagccccaaccaccaaactagccgtttggtggaggctgtctgttcgatggtgcaccggacagtccggtgcacactggacagtccggtgcgccagccacatcaccaaagccgttgggttccgaccgttggagctctgacttctgggcccgcctggatgtccgatggcgcaccggacatgtactgttgagtgtccggtgcgccagcatgggcgtgcctgacctctacacgcgctagcgcgcatttaatacgacgcaggtagccgttggcgccagaagtagctgttgccccgctgttacaccggacagtcctgtgtacaccggacagtccggtgaattatagcggagcagctgaaatgaattcccgaggttggcgagttcctgaggactctcttccttggagcaccggacagtccggtgaattataaaggagtcacctctggaatttcccgaaggtgacgagtttggagttggagtcctctggtgcaccggacacggtgcgccagaccagaggtgccttcggttgtcccttgctcctttgtttgaacccaatacttggtctttttaatggctaagtgtgaacctttggcacctgtataacttatacactagagcaaactagttagtccaatatttgtgttgggcaattcaaccaccaaaattaattagggactaggtgtaagcctaattccctttcaagatcaaatgcctcaatgttaggcggctcctcttcgaccacctgttcttctcctgtggggggtgtgagacagcaagagtgagctcatatacgttcatagctcaacaagtcgtggggaataatgtggcatgaactcaccaaaggtgggagttcatgtagtgtaaggctgatcaatgaaataaaggctgaagttgagcattgcttttataagttggtcaaaattttattagcaattactaagtgtaagtaaataccaaaccttaataataataaagaaaagtaatagtaaaataatcccaaatgcgatgcaaatgtcaaattgaatttaagttccataattaatcatgtgagggtccgagccgctcttgaccgtgagcacggctagtatactagttttacattctgcagaggttgcgcatctttacccacaagtcatgttacccatctgccaagagacggccaatcccatacacctctaccgaggaggcgaggcagggtaacactacgaggcctttacaaagttccactagcttcagaaatcccgctacagtttataggaagctccagtgcagggttcttgcctgaccgccatcgcagcaaaatcaaccaaggacctccctacactgaccactcccctactgcccttgtccctttcgggtaaggaagacctccactagctttcctagttaatcagccaagggcgtcccattaaactcttgtggtagcactgttttcccgggtggtcgctccatgttcccattaatttaatgatcttaacatgaacagtaataataacaagataataaaagagtaatcatgaatgttgtatctccatacccaatccacataaagcaatagcaagtactacccaaaaatatttcaggggtgaacaaggtatagaggtactcaaaactggggtaacataaaggatcccatcaaaattaacctatgcagatcattaaaattaataagaacatggctgggaaaagtaagtgatcaagggcacaacttgccttcaatgagctcctgctcagctacttctacttgttgaacctcagtttccacagtggcttgctcgtctattcgcatcaacacaatacatacatagtatagctaaaatcaacatcacaccaaacatgtaaataaaatatacagtaaaaatctacacattaaaatgagatcataggaactggaatcactaaatttggagttatagaattcaagttatgaatttcctaaggtttaatgtgattaaaataggattagatgagaaattaattttctaactgagttcatgtcaaaacagtgatactaaatgatagagaatattattacaaaattttagaaattggaatggttcaatttggaccaaaaatggaatttctatgaattttacaagtttctagatttgtttttgtattaaaaatgaatttctaatattatttctttgtttttaaacgtctctggactgggcctcgaattccagaaagtccaggggcccgcgcgcataaatgcctagactcagtgaatagtattacctggacggcgggttgattacttaagactgtggggtctctttagtaaagttgacccgcgaaggggtatccttagatgtgggccgctggatctgaaatatgcggtcccgattagacccagagcgtgatggtcggtgatctgtgcgaactgccgatgacgcaatggacggctctgatttaaaaagaccagatctatctacgcccgttggatctagatcaacggcgctggctaatccacccaaccggtaacccattgatctaatcgcaaccgtcgaactatggatcaacggtcacaaccctttctctcctcccccaggtcaccgcagagcgacggcgatgagctccgcggcggcggtctcaccagcgaactgcgaaccggtgctccagcgcgccaaaccctgattaactagtcctacaccttgcgctaaacgagacggacgtggctgaggtatccgtacctggaattggagacctgacgaggccggacacggtgcgaggcggatccgtggcggtggaagaacaacggcgagcaattcggagtgctccgcttactaattccacccgaatgtgccaccgacagttttgggcgttgcccacgaaccccccggacgccttgccatggccggaaacccccgtagtactgatctagccggcggcggccctccctcaggttgagcttgccgcggcgctgcgctcgctgtggtgtactcgccgaggaaagcagaggggaggaggagatcgtgggcgcgcccggcttttatctcccccgactagctcaacgactatcgcggtattcatggcagggatgacggggatgcggcgaccgcgctgttgctcccgcacgcgaagtccgcggaggggaaggacccgacagcgtggtcccgcgtgtcagcgatggagcgaaggaggcggccgctcgagcgagtagcgggcgaggctgaccgatgggccccacatgtcggcgccggtttttgtggtttgggccgcgcgtgagtggaggagcggaattgggccgaattgagctccgcagcccaggtaaggttgttctctctttttcttttattttctgttttatttcatttttgttttcaatttcaaattctgaattttgaatccttttaggagtttcacctttgggtaaaatttacacattcaagtctaattatagaggtattatattttaatgtatgtatgtgttttattctctttttcactcatataatattttttttcttcttatcttcttttctaaattcttgaattccttttagaattcaaattctactttaagctttgatatacttcttgtcattttatgttatcacaagatgcacaaaataaaatcccaacatgatgcatgtattatttttaggtgtttttttgtcatttagttatttgttatatgtgatgtgctcatgaaatgataatcttggatgacacacatatgtataaaggaatataattctctttatactcttattacaaagtggatattacaaatcctaccccccttaaaaataatctcgtcctcgagatttaggaggaacgaggaaaaaggtggggaaaatctatgcgaagctcttcttctctttcccaagttgcttcatcttcaccgtggtggctccattgaactttgcacatctttataaccttatttctcgtaactcgagtcaaagtgtccaaaatcttgatggggtactcagcataagttagatcatcttgaacactaaggtcctccattggtaaccgctcttcaggtaccctgagacatttcttcagctgagatacatgaaagacatcatgaacatccgcaagatgatccggtaactccaattggtatgcaacctctcccactcgctttaagattaagaagggtccaataaagcgaggggacaactttcctttgactttgaatcttctcataccccggagtggtgacaccttcaaatagacataatctccctccttaaactcaagcagtctcctccgggtgtcagcatagcttttctgcctggactgtgcagttctcaaattctcccttatttgctgaacttgctcctctgcttcttgtataatctcaggcccaaacaactgtctttcaccagtttgatcccaatacaatggagtcctgcactttctgccatacaaagcttcaaacggtgacatcttcagactggcctgatagctattattataagagaactcagcatagggcaaactcttatcccaactaccaccattcttaagggcacaacctcttaacatatcttctaacacttggttggtcctctcagtgtgcccatccgtctgtggatggtaagccgaactaaaattcaatctcgtatccaatgactcgtgtaacttcttccaataccgagaggtaaactgtgatccccggtctgacacaatcttctttggtacaccatgtaggcatacaatctgtgccatgtacaactctgccaacttggctcctgaatacgtggtcttcactggaataaagtgggctactttagttagcctgtccacaatcacccatatagaatcatatccagcagacgtgcggggtaatccaacaatgaagtccatgccaatctcttcccatttccactcaggtaccttcagtggatgcagtagcccggctggcctctggtgttcaaccttaactctttggcacacatcgcacatagccacatgtgcagccacatctctcttcaatccataccaccaatacttttgcttcaaatcctgatacatcttagtgcttccaaggtggatagaataaactgaatcatgtgcctccttcaatatggtttcccgaagactatcaatatcgggaacacagatccgattcttgaactatatcgtgccttgctcatcctctgtgaactccgggcctctaccctcagttatcagatccttgatctcctgaatcttagcatcaccaacctgacctgtacgaatttcttgctccaaggtaggttccaattcaatagtaactccttccgtatgtgtaacaatccccaggttgagcctctcaaaatctttggctaattcatcaggtagctggacaacgaaagcggagtgaacatgctccttccgactcaaggcatctgcaaccaaatttgccttgcctgggtgatagtgaatttccaaatcataatccttaatgagctccaaccaacggcgttgcctaaggttgagatccttctgagtgaatatgtacttcaagctcttatgatccgtgtatacttggcacttagttcccataatgtagtgtctccaaatcttaagtgcatgcacaactgctgccaactccaagtcatgagtggggtagttcaattcatgtttccgcaactgacgagatgcataagcgatcacatgaccttcttgcataagcacacatccaagtccctggccacatgcatcacagtaaatgtcaaatcccttctgtagatctggcataatcaatactggcggtgacatcaatctctccttcaattgatcaaagctctcttggcatttctcatcccactggaattctcttcctttctccaaaagcgaggtcataggcttggcaatcttagagaacccttcaataaatctccgataatatcctgcgagtcccaagaaactcctaatctcagtaactgtagtgggcactctccactccattatctccttcactttagcaggatccactgctattcctccattagaaataatatgtccaaggaatggcaccttgtcaatccaaaactcgcacttgctgaacttagcgtagagttgattatctcgtaacttctgtagcaccaaccttagatgttgttcatgatcactttcattcctagaatagatcagaatatcgtcgataaacaccacgacgaatctatccaaatactccataaacactttgttcatcaaattcatgaaataagccggtgcattggttaatccaaatgacataacagtaaactcatataatccatatcgggttgagaaagccgtcttaggaatatctgatggtctaatcttcatctgatgatatcctgatcggagatcaatcttcgagaataccctagctcctctcatctgatcaaataaatcctcaatacggggtaatgggtacttgttcttcaccgtgacatcattaagtgatctatagtccacgcacattcgttgcgatccatccttcttctgtacgaataacaccggtgctccccaaggtgaggaactcggatgaatataccccgcctcctgtaacttagttaactacttcttaagttccttcaactcctctatgaacatcctatatggccgtttagaaataggggcggttccaggtaagagatcaataacaaactcaacttctctatcaggtggcatccctggtaactcctctggaaagacgtccgaaaaatctctaaccacccggatgttgtctccaacaaactcctcaggtataaagaacattgcacgcatggatgaggaggttactgcaatattaacttgaaatctttctcctttagtggtagtgagttctacggtacctctaccacatgctataacggcctttgcctttcttagccatgacataccaaggatcagatctatactgcttgactctaatattatagcagtagctccaaattctctacccataatggtcaatgtcaatctacgtgtcatttgattcgcctcaacaggccctttaggtgtaattactatcatgggttttctcatatttagcagtggtatttcatttgtgttggcatatctagcagacatgaatgaatgtgtagcaccagaatcaaataacatggttgcaggaattgcattaacataaaacacaccaagtacgatgtccccaccatccggagtagcatcaacgctgacttgattaaccttggcaatagaatatcccttaccagatcctggagtttgctgcttgttctgaactagagtagtagcaatcctctgtgggcaaacatttgcataatgaccagtcttcccacacttaaaacaagtagtgcctggactctgtcctgaatacttcgtcggggtgccagtgggggtagcatgtcgagtaggtgtccgtggagacccctgtggagcatactgagctgtacgtggccctcctggtcgagtcggtgtaccctgtggtggaacgtagcggggacgaacactgctgctaccctgtccctgtgagatagccttcctcttcaaatcacccagttgaacacacttgtgttcaatagcaagagccttatccagtagcctctgaaatgatggaaaggtgtgtgccaccagtgcatactgcaagggtccattaagtccttcaataaagtgctcctgcttcctctcatcctcagcaacttcctccggagcatatctcgacagttgaataaatttgtctctgtactcgctgactgacatgttgccttgctttaatgacaaaaactccttcttcttgatctttatcataccagctggaatatggtagttcctgaattatgcactgaactctgcccaagtaatagtatcagcagcatcgtgggcagcagtataagaatcccaccagtcagcagcaggacctgtcagacgacccgaggcataaagaactttctcccggtctgagcattgggcgatgttgagcatcttctcaattgcttttagccaatcatcagcatcaagtggatctggcgaactggcgaaggtcggtggcttatgactcataaactctcggtgcttatcacgaggtggaactggtggtggtggtggaggcaatggcacttgttgctgttgctgctgttgttgaagttgttgttacagctgttgttgttgcgccctcctttcctggcgtatctcctctctctcctggcgcaactcctggcgtatatcttttctttcctgacgcatctcctggcgttcttgctgcatctgggcacgcatatcagccatagtgtccgccatttgctgcatcaccgccatctgagctgcaatcagtggatcaactccgcctggtggaggattaggaggattcatccctgctggctgtggctgaggttgtctatatatccttcgagtgtgtcgattaggaggcaaatcaattccaccacccctcctggtattgaccatctgagttagatacatatggtaagagagagcagtagacaaggcagtaattacgaatcatgttactttgggggatttattagctaagcagattaatattttacctaccatagctaatttattaccttatgctggcacatactaagatgtccatatataatatttcaatcaatcaaagaagcgaatcaggcattgatcatcagaacaatcaaccaacatttttaatagagaaaatagttttaattttgtcttaggcttcctatctcttaaaaatgtcataggggtagggattccaaggtgtgaaatccatcttgtctaaaagtagaaaaggtaagaatgatcagagtagaatagtagaaggtgagacaggatcaagatgagtgtagaaagaatcagagtaaggtaagtatagaatgaatcagaataagataagtaggtaagggtttgaccatttctatctaggtttcgtcctacagtcaacatttcctctgataccacttctgtcacacccggatttaagggacaaagccgggtgcatctcatacatgcgccaagaagacaacatatataataacagagtgtatagagataaatgtcacgatacatcagagtaattattacaaagcagaagacttattacaaaatataaggataaatataaaatgaactaaggatcgttggcgccaatgtcaaccgagaaacgccacctagatcagatcaaatgcctcagtgttaggcggctcctcttcgaccacctgttcttctcctgtgggggggtgtgagacagcaagagtgagctcacatacgttcatagctcaacaagtcgtggggaataatgtggcatgaactcaccaaaggtgggagttcatgtagtgtaaggctgatcaatgaaataaaggctgaagctgagcattgcttttataagttggtcaaaattttattagcaattactaagtgtaagtaaataccaaaccttaataataataaagaaaagtaatagtaaaataatcccaaatgcgatgcaaatgtcaaattgaatttaagttccataattaatcatgtgagggtccgagccgctcttgaccgtgagcacggctagtatactagttttacattctgcagaggttgcgcatctttacccacaagtcatgttacccatctgccaagagacggccaatcccatacacctctaccgaggaggcgaggcagggtaacactacgagtgaaagggaattaggcttacacctagttcctaaataattttggtggttgaattgcccaacacaaatattggactaactagtttgctctagtgtataagttatacaggtgccaaaggtccacacttagccaataaaaagacaaagtattgggttcaaccaaagagcaaagggacaaccgaaggcacctctggtctggcgcaccggactgtccggtgtgccaccggacatgtccggtgcaccagaggactccgacttcaaactcgtcaccttcgggaaattccagaggcgtctccgctataattcaccggactgtccggtgctccaaggaagagcggcctccggaactcgccagcctcgggaattcgttgaagctgctccgctataattcaccggactgtccggtgtacaccggactgtccggtgtaacagcggggcaacggctatttcggcgccaacggctacctgcgacgcatttaatgcgcgccagaagcgcgcagtcgtcaggcacgcgggagcaggcgcaccggacaatctacagttcatgtccggtgcgccaccggacatccaggcgggcccagaagacagagctccaacggtcggaacccaacggctttggtgacgtggctgtcgcaccggacatgtccggtgcgtacaccggacatgtctggtgcgccatcgaacagacagcctcaccaaatggctagtttggtggttgggggctataaatacccccaaccacccaccattcatggcatccaagttttccagcttccaaccactatacaagagctagcattcattgcaaagcacaccaaaagagatcaaatcctctcccaactccacacaaagccttagtgactagagagagtgatttatcgtgttcatttgagctcttgcgcttggatcgcttcttttctttggcattccttcttgtgatcaaacactcacttgtaattgaggcaagagacaccaatcgtgtggtggtccttgcgggaagtttgattcccaagtgatttgagaaagagaagctcactcggtccgagggaccgtttgagagagggaagggttgaaagagactcggcctttgtggcctcctcaacggggagtaggtttgagaaaatcgaacctcggtaaaacaaatccgcgtgtctcacttcattattcgcttgcgatttgttttgcaccctctctcacggactctattatatttctaacgctaacccggcttgtagttgtgtttatatttgtaaatttcagtttcgccttattcacccccccccccctctaggcgactttcaattagtatcagagcccggtgcttcattagagcctaaccgctcgaagtgatgtcgggagatcacaccaagagggagatggagaccggcgacaagcccactacgagccaagggagcacttcatcggaagactcccgcaccaagaggaaggagaagaagaaggactcctccaaacggaaggagaaaagatcttcttcttctcaccacaaagagaagaaggaaaaatcttcttcccacaagtcgcatcggaaaggcgacaagcacaagaggatgaggaaagtggtctactacgagaccgacacttcatcaacatctacctccgacttcgatgcgccgtccgtaacttctaagcgccaagagcgcaagaagtttagtaagatccccttacactatcctcgtacacctagacatactccattactttccgttccattaggcaaaccgccaacttttgatggcgaagattatgctaggtggagtgatttaatgaaatttcatctaacctcactccacaaaagtatatggaatgttgttgagtttggagcacaggtaccatccataggggatgaggattatgatacggacgaaggggcccaaatcgaacacttcaactctcaagctacaaccatactcctcgcctctctaagcaaggaggaatacaacaaggtgcaagggttgaagaatgcaaaggagatttgggacctactcaagaccgcgcacgagggtgatgaactcaccaagatcacaaagcgggaaacgatcgagggggagctcggtcgttttcgtcttcgccaaggggaggagccacaagatatgtacaaccggctcaaaaccttggtgaaccaagtgcgcaacctcgggagtaagaagtgggacgaccacgaggtggttaaggttattctaagatctctcattttccttaaccccactcaagttcaattaattcgtggtaatcctagatacacactaatgactcccgaggaagtaatcgggaattttgtgagctttgaatgtatgatcaagggctcaaagaagatcaacgagcttgatgaaccctccacgtccgaagcacaaccggtggcattcaaggcgacggaggagaagaaggaggagtctacatcgagtagacaaccaattgacgcctccaagctcgacaatgaggagatggctttaatcatcaaaagctttcgccaaatcctcaagcaacggagggggaaggactacaaaccccgctccaagaaagtgtgctacaaatgtggtaagcccggtcattttattgcaaaatgtcctatgtctagtgacagtgacaggggcgacgacaagaagggaaagaggagagaaaagaagaagtactacaagaagaagggtggcgatgcccatgtttgccgggagtgggactccgacgagagctccaccgagccctcctccgacgaggacgccgccaacatcgccgtcaccaagggactcctcttccccaacgtcggccacaagtgcctcatggcaaaggacggcaaaaggaagaaggttaaatctaaatcctccactaaatatgaatcctctagtgatgataatgatagtgatgaggaaaataatttgcgaaccctttttgccgacctaaacatgcaacaaaaagaaaaattaaatgaattaattagtgccatccatgagaaggatgatctcttggactcccaagaggacttcctaatcaaggaaaataaaaagcatgttaaggttaaaaatgcttatgctcaacaagttgaaaaatgtgaaaaattgtctagtgagctaagcgcttgccatgagactatagacaaccttagaaatgaaaatgctagattaattgctaaggttgattctcatgtttgtgatgcttcaattcccaatcttatgaatgataatgatgatttgcttgctaagattaaggaattgaatgattctcttgctagccttagagtagaaaatgaaaatttgattgctaaggctaaagattttgatgtttgcaatactattatttccgaccttagaactaagaatgatatgttgcatgctaaggttgtagaattaaaatcttgcaaaccctctacatctaccgttgagcacacttctatttgtactagatgtagagatgttgatatcaatgctattcatgatcatatggctttaattaaacaacaaaatgatcatatagcattattagatgccaaaatcaccgagcataacttagagaatgaaaagtttaaatttgctagaagcatgctctacaatgggagacgccctggcatcaaggatggcattggcttccaaaggggagacaatgtcaaacttaatgcccctccaaagaatttatctaactttgttaagggcaaggctcccatgcctcaggataacgagggttacattttgtaccctgccggttatcccgagagcaaaattaggagaactcattctaggaagtctcactctggccctaaccatgcttttatgtataagggtgagacatctagctctaggcaaccaacccgtgccaagttgcctagaaagaaaactcctaatgcatcaaatgatcatgctatttcatttaaaacttttgatgcttcttatgtgcttactaacaaatccggcaaggtagttgccaagattgttgggggcaaatacaagggctccaagacttgtgtttgggtacccaaagttcttgtttctaatgccaaaggacccaaaaccatttgggtacctaaagtcaagaactaaaattgttttgtaggtttatgcatctgggggctcaagttggatactcgacagcgggtgcacaaaccacatgacagggagaagaagatgttctcctcatatgagaaaaaccaagatccccaacgagctatcacattcggggatggaaatcaaggtttggtcaaaggattgggtaaaattgctatatcacctgaccatactatttccaatgtttttcttgtagattctttagattacaatttgctttccgtatcccaattatgtcaaatgggctacaactgtctatttactgatataggtgttactgtctttagaagaagtgatgattcaatagcattcaagggagtgttagagggtcagctatacttggtagattttgatagagctgaactcgacacttgcttggttgctaagactaacttgggttggctctggcaccgccgactagcccatgttggaatgaagaatcttcataagcttctaaagggagagcacattttaggactaacaaatgttcattttgagaaagacaggatttgtagcgcatgccaagccgggaagcaagttgggactcatcatccacacaagaacatcatgactagtgacaggccactggagctcctacacatggacctattcggcccgatcgcttacataagcatcggcaggagtaagtactgtctagttattgtggatgattattctcgcttcacttgggtgttctttttgcaggaaaaatctcatacccaagagaccttaaagggattcttgagacgagctcaaaatgagttcggcttaaggatcaagaaaattagaagcgacaacgggacggagttcaagaactctcaaattgaaggcttccttgaggaggagggcatcaagcatgagttctcttctccctacaccccacaacaaaatggtgtagtggagaggaagaatcgaactctattggacatggcaagaaccatgcttgatgagtacaagacaccggatcggttttgggccgaggcggtcaacaccgcctgctacgccatcaaccggttatatctacaccgaatcctcaagaagacatcctatgaactcctaaccggtaaaaagcccaatatttcatattttagagtttttggtagcaaatgcttcattcttgttaagaaaggtagaaaatctaaatttgctcctaaaaccgtagaaggctttttactaggatatgactcaaacacaagggcatatagagtctttaacaagtcctcaggacttgttgaagtttcttgtgacgttgtgtttgatgagactaacggctctcaagtagagcaagttgatcttgatgagataggtgaagaacaggctctgtgcatcgcgctaaggaacatgtccattggggatgtgtgtcctaaggaatccgaagagcctccacatgcacaagatcaaccatcctcctcaacgcaagcatctccaccaacccaaaatgaggacgaggctcaagttgatgaaggtaaagatcaaagagatgagccacctcaagatgacggcaatgatcaagggggagatgcaaataatgaagacaaggaggatgaacaaccaaggccgccacacccaagagtccaccaatcaatacaacgagatcaccccgtcgacaccatcctcggcgacattcataagggggtaaccactcgatctcgtgttgcacatttttgtgaacattactcttttgtttcctctgttgagccacacagggtagaggaagcacttcaagattcggattgggtgatggcgatgcaagaggagctcaacaatttcacaaggaacgaggtatggcatttagttccacgtcctaaccaaaatgttgtaggaaccaagtgggtcttccgcaacaaacaagacgagcatggtgtggtgacaaggaacaaagctcgactcgtggccaaggggtattcacaagtcgaaggtttggatttcggtgaaacctatgcacccgtagctaggcttgagtcaattcgcatattattagcctatgctacttaccatggcttcaagctttatcaaatggacgtgaagagtgccttcctcaatggaccaatcaaggaggaggtctacattgagcaacctcctggctttgaagatagtgagtaccctaaccatgtctataggctctctaaggcgctttatgggctcaagcaagccccaagagcatggtatgaatgccttagagatttccttattgcaaatggcttcaaagtcggcaaggccgatcctactttgttcactaaaactcttgacaatgatttgtttgtatgccaaatttatgttgatgacatcatatttgggtctactaacgaatctacttgtgaagaatttagtaggatcatgacacaaaaattcgagatgtctatgatgggggagttgaaatattttctaggattccaagtcaagcaactccaagagggcactttcattagccaaaccaagtatactcaagacattctaagcaagtttggaatgaaggatgccaagcccatcaagacacccatgggaaccaatgggcatctcgacctcgacacgggaggtaagtccgtggatcaaaaggtataccggtcgatgattggttcattgctttatttatgtgcatctcgaccggacattatgctttccgtttgcatgtgtgcaagattccaagccgaccctaaggaatcacaccttacggccgtaaaacgaatcttgagatatttggcttatacacctaagtttgggctttggtaccctcggggatccacgtttgatttgattggttattcggatgccgattgggcgaggtgtaagattaataggaagagcacatcagggacttgccagttcttgggaagatccttggtgtcttgggcttcaaagaagcaaaattcggttgctctttctaccgccgaagccgagtatattgccgcaggccattgttgcgcgcaattgctttggatgaggcaaaccctgcgggactacggttacaaactaactaaagttcctcttctatgtgataatgagagtgcaatccgcatggcggataatcccgttgagcatagccgcactaaacacatagccattcggtaccattttcttcgagatcaccaacaaaagggggatatcgagatttcatacattaacactaaagatcaattagccgatatctttaccaagcctcttgatgaacaaacttttaccaaacttaggcatgagctcaatattcttgattctaggaatttcttttgctaaacttgcacacatggctcataagtctacctttgatcatgtctctttgatatatgctatgactaatgtgttttcaagtgtatttcaaaccaagtcataggtatattgaaagggaattggagtcttcggcgaagacaaaggcttccactccactctactactcatccttcgccgtcactccgagcatctctccaactttggtataatcttcactcatttattttatgaccaaaggaggagaaagtacttcgttgggctctaatgattccggttttggcgattcatgccaaagggggagaaaatatgagcccaaagcaaaaggaccgcaccaccaccctaatttttaaaattaatgattttcaattggaaaatttcgaattagtatctctttgtgttctaaagggggagcaagtagtattttcaaaacttgatatctcaaaaccctcttgaacactaagaggagattttctttgagggggagttttgtttagtcaaaggaaaagcatttgaaacaaagggagaaaatttcaaaacttgaaaatgcttctcaaaatcctattcatttacctttgactatcttgcaaaaggactttgaaaagaatttacaaaagaatttgcaaaaacaaaacatgtggtgcaaatgtggtccaatatgttaaaaacaaagaaacaatccatgcacatcatgtaagtattcatatttgctcaattccaagaaccctttgcacttacattatgcaaactagttcaaattatgcacttttatatttgctttggtttgtgttggcatcaatcatcaaaaagggggagattgaaagggaattaggcttacacctagttcctaaataattttggtggttgaattgcccaacacaaatattggactaactagtttgctctagtgtataagttatacaggtgccaaaggtccacacttagccaataaaaagacaaagtattgggttcaaccaaagagcaaagggacaaccgaaggcacctctggtctggcgcaccggactgtccggtgtgccaccggacatgtccggtgcaccagaggactccgacttcaaactcgtcaccttcgggaaattccagaggcgtctccgctattattcaccggactgtccggtgtacaccggacatgtccggtgctccaaggaagagcggccttcggaactcgccagcctcgggaattcgttgaagctgctccactataattcaccggactgtccggtgtaacagcggggcaacggctatttcggcgccaacggctacctgcgacgcatttaatgcgcgccagaagcgcgcagtcgtcaggcacgcgggagcaggcgcaccggacaatctacagttcatgtccggtgcgccaccggacatccaagcgggcccagaagacagagctccaacggtcggaacccaacggctttggtgacgtggctgtcgcaccggacatgtccggtgtgcaccggactgtccggtgcgccatcgaacagacaacctcaccaaacggctagttttggtggttggggctataaatacccccaaccacccaccattcatggcatccaagttttccagcttccaaccactatacaagagctagcattcattgcaaagcacaccaaaagagatcaaatcctctcccaactccacacaaagccttagtgactagagagagtgatttattgtgttcatttgagctcttgcgcttggatcgcttcttttctttggcattccttcttgtgatcaaacactcacttgtaattgaggcaagagacaccaatcgtgtggtggtccttgcgggaagtttgattcccaagtgatttgagaaagagaagctcactcggtccgagggaccgtttgagagagggaagggttgaaagagactcggcctttgtggcctcctcaacggggagtaggtttgagaaaaccgaacctcggtaaaacaaatccgcgtgtctcacttcattattcgcttgcgatttgttttgcaccctctctcgtggactctattatatttctaacgctaacccggcttgtagttgtgtttatatttgtaaatttcagtttcgccttattcacccccccccctctaggcgactttcaacgaggcctttacaaagttccactagcttcagaaatcccgctacagtttataggaagctccagtgcagggttcttgcctgaccgccatcgcagcaaaatcaaccaaggacctccctacactgaccactcccctactgcccttgcccctttcgggtaaggaagacctccactagctttcctagttaatcagccaagggcgtcccattaaacccttgtggtagcactgttttcccgggtggtcgctccatgttcccattaatttaatgatcttaacatgaacagtaataataacaagataataaaagagtaatcatgaatgttgtatctccatacccaatccacataaagcaatagcaagtactacccaaaaatatttcaggggtgaacaaggtataaaggtactcaaaactggggtaacataaaggatcccatcaaaattaacctatgcagatcattaaaattaataagaacatggctgggaaaagtaagtgatcaaggacacaacttgtcttcaatgagctcctgctcagctacttctacttgttgaacctcagtttccacagtggcttgctcgtctattcgcatcaacacaatacatacatagtatagccaaaatcaacatcacaccaaacatgtaaataaaatatacagtaaaaatctacacattaaaatgagatcataggaactggaatcactaaatttggagttatagaattcaagttatgaatttcctaagttttaatgtgattaaaataggattagatgagaaattaattttctaactgagttcatgtcaaaacagtgatactaaatgatagagaatattattacaaaattttagaaattggaatggttcaatttggaccaaaaatggaatttctatgaattttacaagtttctagatttgtttttgtattaaaaataaatttctaatattatttctctgtttttaaacgtctctggactgggcctcgaattccagaaagtccaggggcccgcgcgcataaatgcctagactcagtgaatagtattacctggacggcgggttgattacttaagattgtggggtctctttagtaaagttgacccgcgaaggggtatccttagatgtgggccgctggatctgaaatatgcggtcccgattagacccagagcgtgatggtcggcgatctgtgcgaaccgccgatgacgcaatggacgactctgatttaaaaagaccagatctatctacgcccgttggatctagatcaacggcgctggctaatccacccaaccggtaacccattgatctaatcgcaaccgtcgaactatggatcaacggtcacaaccctttctctcctcccccaggtcaccgcagagcgacggcgatgagctccgcggcggcggtctcaccggcgaactgcgaaccggtgctctagcgcgccaaaccccgattaactagtcctacaccttgcgctaaacgagacggacgtggctgaggtatccgtacctggaattggagacctgacgagaccggacacggtgcgaggcggatccgtggcggtggaagaacgacggcgagcaattcggagtgctccgcagactaattccacccgaatgtgccaccgacagttttgggcgttgcccatgaaccccccggatgccttgccacagccggaaacccccgtagtactgatctagccggtggcggccctccctcgggttgagcttgccgcggcgctgcgctcgctgtggtgtactcgccgaggaaagcagaggggaggaggagatcgtgggcgcgcccggcttttatctcccccgactagctcaacgactatcgcggtattcatggcggggatgacggggatgcagcgaccgcgctgttgctcccgcacgcgaagtccgcggaggggaaggacccgacagcgctgtcccgcgtgtcagcgatggagcgaaggaggcggccgcgcgagcgagtagcgggcgaggctgaccgatgggccccacatgtcggcgccggtttttgtggtttgggccgcgcgtgagtggaggagcggaattgggccgaattgagctccgcagcccaggtaaggttgttctctctttttcttttattttctgttttatttcatttttgttttcaatttcaaattctgaattttgaatccttttaggagtttcacctttgggtaaaatttacacattcaagtctaattatagaggtattatattttaatgtatgtatgtgttttattctctttttcactcatataatatttttttcttcttctcttcttttctaaattctttaattccttttagaattcaaattctactttaagctttgatatacttcttgtcattttatgttatcacaagatgcacaaaataaaatcccaacatgatgcttgtattatttttaggtgttttttgtcatttagttatttgttatatgtgatgtgctcatgaaatgataaacttggatgacacacatatgtataaaggaatataattctctttatactcttattacaaagtggatattacagcccatgtatagttcggccccatattacagggtcccgcctgcaggccgccatgctggcaaggctgatagagggttgacccatgtctgtaattgattactctgtaatgacccgccataacccccaagagggaatattctggggataacctaggtaactgagggtccaattgtctttaacaaggcagggcagaccctcggttacctataaatacccccatactatgtcgttgtgggggacggagaaaaacactgttgccccagtatattgcattcactggcatcaaaccatttttcactcttccaccatttgagcttgctaggccgtgagtttgcaagttccgacagcgatccatgtgggttgtttgccttaaagttttccccactactttcatcttatctggccgtgagtttgcgagtagctcatggagtcctctatattttttcagtccctattctcactagaggcatgtgccaaaaggtcaaaggatcataaatgctctagccctatatgcttcctaaaggatgtgtagacaagcaattgaatgaatttacttttgggtgagataagttatcttacatgaaaaatgtttcatctcttctgtatttgtgtacatgtagtgtagagcatttttgttctttcgaactaaaattgtaggcagtgcaaccatcgataatttcgctcttccattgaaataaaatttaggtcactacaaggttaatctccatctacatggtaccacaatgttggctctatggcattgcttatttgtgcaaagtatagactcatgaagtatgtaatcttttaagtttgaattcttcaatgatgcacccttcaactcttgccttatatctcaagtcactagagccaacccaatgagaataatttttcagcggtgcaccattcaaccatctgtcaccaacctgatgtgaatatttatcgggtcactagcaaagtctaggtcaaagttgtctagaggcttccatgtatcactatcgtatggtgcaccatcacattgccattctaatgaacaccttatttgtgccatgtcatatgtttggtgttgtatagctagagacatgcaactatttcatacgatctttaagggacatcatttgaagtaccttatgtggaaccttggtcatcacatcctcatcatcatcattccgacctcaatgtacctcaatttgacacacactttacacttttctttctcattacctttctataaaagcatataaccatctttatacacatcaaccttctcatatggcatgcttctttgaatggtatatgtctttgggcttcttgtgattttctagaaggatatcgctaatcaaatttataagctccttataacatttacttgagaatgcaaacttggacctgatagccataagtcgggtcacaaaggcgagggtggacactattatgtgttcgtgtattggctcttttgaagctctaaggagctacaagaaccttttaacctcctcgaacattgaatcctctaaatttgggtcatactatgatagtatatcattaaccaccttgtccatcctatcatcatctgtctcttgtgttgttgcttgtgttgtcacttgtgtctcatgctgatggtgtgaattatcatggtgtcaccacatctcgtattttcatatgaaaccataggtacaaaggtggagtattattgttctttagtccttgcatttatagttgtggcaatttgtacatgggcataacacattagcaccccattgtggtttcttacaaactaaagccacaaccaacaaattcctaagttcttcaccatctaatcatgagagtgagacccaatcttattttaaccataatacatccatcgacgatcctcactcataatgtaaaggatagagagcatgtgttaccttatcagcagaaggttgaagatggcccaacaacaacgcaccggtgcagatcaggcggtggcaaggtcgataacagcgcacatacgctagtgtcctatgggaaggcgtgctatggcggggtagccacgatagtggtggtgtgcggcgggtgtggagtgcaataatagattgggcgtggggagggcaattcaaggctgcacagcgtgacatgatatggtgtgacgatgagagggtgtgcagccgcggggggcatgggacagcagcgtagtcacgatgtgcagtgtgagaagagaagcatgtggcgatgagatatgcgagcaaggcgggcgcggctcatcgaggcttgtggctgggctagttgggtttattccactaactttcgtcggctactgacacaacccatggaagttatttgtggctttcatggttttgtcagtaggtaacaaaaataattaattttcatcagtaatcgacacggtcgacaaaaattatgaataactttcatcggttgaacgacaaccgacagaaactatttaatttttgtcgactaccctaaatatcaacaataattaatggggccaacgatttttttagttttcatgtgttgtataaagatggtcatgcgttgttgtcgttgccaaaagggttaggaaaaaaacagttccgttgggttatttttaaaatcgtatgtataaatagtaaatggagaatggctatattcagccatggaatctcttcccaagttggaggctcgaggtgaatattggagattcccttccattgttttcaaggacatgaaattacttgttctttttatgacaatttttataggatctttatatataacagatttatgcttctaatgctcagtcttgttttttgcccttcgtgttcaccaagtgccactattgtttatggctcaattaagaaatgtaatggcggctaaagtggctcttcaattcactactacagggatttgcaaatgtttgcgtggggtcaaagtgcccacaggtttctcatccaatatcagcagactagtcaggatgaaggacttgtctctatttggctacaactctcatgactgccatgtgatgatgacggtgttcctcccaattgcggtaagagccctcgaaacagagcatgtcaaagttgtcatcacacgcttgtgttactttttcaatgcggtttcacaaaaagtaatagctttagaagacttggactatctaaaggcatacatcatcgagactatgtgcaagcttgaaatgtgttttcctccatcattttttgatatgcaagtacacctaatcatacatctcgtggatcagataaaaatattagggccactatatttacatcacatgtttcagttggagcgatacctgggagtattaaaaggttatgtgcgaaatcgcgctcacccagagggttcaatcatggagggatacactacagaagaagtgattgagagctgtatagattacatcagtgacggaacaatgataggtgtgcctgtacctaaacatgagggtaaactatgtgggagagggagaatgggcaagaaaacttttcgcgttgaggattacaagctagtacattgtgctcatggtagtgtactacaacatctcacgatagccgagccttacatagaggaacacctgaatgagcttcgtaaagaaaatcagaaccgcacagaggactggatcatgagggagcacaaacatcgtttcagcgaatggttaatggacaaaaacatcccattcggagactcttcggatgagaaaacaatgaagaatttggcttctgggccatcgtgttttgtgacatcatggcaagcatatgacatcaatgggtacacattctacactaaatcaaaagacatgaaaagtgttgcacaaaatagcggtgttcgtatcgatgcttttgacctacatggacagaagaccacatattttggattcatagaggaaatatgggaacttgattatggcccaagcatgaaaatacccttatttaagtgccaatgggtacaacatcccgtgggggtgatagtggataactacggactcacactggtagacttaaagagagtaggatataaagatgacccgtgggttctcgctgaatgtgttgcacaagtgttctatgtactcgatccagcagatgagaagatgcatgtagttatttctggaaagcaaaaaattgttggagttgagaatgtgggagaccaagatgaggaatataataagtatgaagagatgttcgtctttaacggtccagagagaatgaagcgtgtggaaaagaaaattgataagaacttaaagccatacatgcggaaaaatggtagttcatgaaaaattgtatgaatcaaattgtatttgttatcatgtatgatcgactatgaattgtggttgccaattaatttaaaatctctctagttatctatgtgtggtattataattcatttaaattgtatttgcatattattgttaaaaattaaatattaattcatttaaattgtatttgcatatttctgttaaaaattaaaattattttcatatttaaattgtattttcatatttttacaatcacaggcggtttttgtcttagggtccgcttgtgaaaatgatagagcaccacaggcggtcctaaacaaaaaccgcttgtgatactattacatcacaggcgtactgaaccgcctgggacatcacaggcggttttctaaccgaaccgcctgtgatgtaaaaatcctaccgcttgtatagagccaaattgtactagtgatagtgattgtactttgggccgtcatttggagcagacaaagctgcatgcaaggcaaaatggcagagatgtggtcgctcgatgctgttgttgcattgcattggacctgaatgcgtccaactacaaaggggatgaatatacgttctgatcaaatggttgctccagtcagattgttagtactagtgcacaagcaagctagtgcggcgggccggcggctccttgcatgtgaaaaaagcttttgtcgtcatggtagtagttactcctatggttctttaattacgcttaggactgtacttggaccggttaaattagattattagttctgtggccgagatctgattgccatgaactgtacttgactgtttaacttaactaaaaaaatatactatccgacattttcatttctctagatagtcatggagtatatctgtatatgtatatattaaaaataatgtattttaaaaaattaaagcgttttattatttagaagaaaaatatttatcatcatcatatattgttgattcaaccgtgtgatccggacagattcaacctagtcgctaggggtgctggagcaatgagcacccctaccctcatgttgttcatagaactttcacgaagaatcccttgaaattctaactatagataaaaaagagaaaaacgacaagaaaaaagagaatggaatgaactctctcgatctctcatgatcttggatgggtccctgatcattaatgttataatagacacactaactagtttaacccaaaagtttaagttgatggaagaaggtagtttattcacttatacacttcaacactctaactcacatgcagctagagataaatgcacaaacatgaaaataaatgggtggatgcataaataaagcctctaccgtactaggatttaaactcgagaactctgtctctgatactagttcaatgcaaaaacttaagctgataagagaagatagtttatctatttatacactttaaccattgacagtgatgactgatatgaatacctatactttgacggcgaccattggcctacgatctgcatctcctgcacgccgtcacctttacatgcatgcaatcgtcttgtggcacaactctcgagatggaatattcctactgtgcctagctaccatgtaaacacacacgcgcttgtgcaaggttgattcctctgcagactgcaggcagtactcgtgtccccctcctgctgattctcgacttgcactagacaaatgcatccatatttatattagtaggcaatcaaactaggaatattcacgagaattaatataagagattaatcttttccgctttatggtacaataatatctaaattagtacagagtattcagtaaggtacggtagtaggccaagcatctgtacgtcaatacgtgtagtacttgactcttcgtgatgtacaacattatcactatcgaatacggctactttatcgagtgctttatacactcgccaaagtctagaaaatattcgacaaactctttgccgagcgtgactttcagtaaagaggtcttgatgaattatacatcgacaacggcttctttgtcgagtactttttatcggtcacacgccaaaggctttaccgagcgacgtctggtactctgcaaagaaaagtcgcgatcacgacgccaagtgacggtgatgaaccctttaccgagtgtcctccctgacactctgcaaaggctccctctttgccgagtgtctgttggactagcactcgacaaagaaggctctagtgggcccctttgccagttcctttgccaagtgctccgagaggcactcacaaaggctctatctttgtcgaggccctgctggactagcgctcggcaaagaaggctccagtagacccctttgccggccccaagtgctctggaagacactcgataaagggagcttttttgccgatggcgctttgtcgagagcccatttttaccgagtattatgatctcaacaaagaagtagcctttttatgccgagagtttggctctcgacaaagactctcttcacggagtgtctttctatgccgagtgtagcactcagcaaagtatgttttgctgagtacttgataaatagctctcgacaaagagctagacactcatcaaagagtcagattttggcagtgtagtaacctttaggcgtgcacttctttttaaaattttgtgacaaacactccttttttaaacatgtaaagcccaaaattggtagagaaaaaaaaatcatgaaataaataagttttggcaatactaaaatattattaactaaatataaatcctaaaacattagaatggaatagtcctctcatgaactacaatattcgggataccttcgaagtcttttctcctaaatttaaaataatttctaacaaaaagttgaataaaaaaatccctatatgaatttagttatccccttgtttaagtaatctacaaagattttgtacccttcccattttttttcttgtatggattgcatatttaagagcatttgttgaaaatgataattaatacataaagaaataaagtactaactacgtatcatgtcggagttttaagtcgtgcatatagcttttcttgaacttatatttgaattagaataaaaaaactgaaattaaacagaattgagaaaatagagagtaataagaaagaaatggtgagtctcacctcttccgtgagtgtggctgtttggcccacttctctataaagctagcccaagccacaagcccacgtccccttcatgtgtgtattttttttatcttttctttatttctcaaaccgtatactgtgtcgtcctggtcagcacttaattcctaacgtacgctcgagttgtcactagttttgtggggcttctggcgttctgggtcagccgttcatcgtatccaccggatcatcgcaacagaattgctgctcgcgcatgccgatggtcctcaccgccatgcggaacctgttatctagatttatctccttcccgagtctggtgatgttgatcccatggtttccgcgactccgttgctagcagatcaaatagccaggacgcaatccctcctcggtatataaataaccgagccccttctcaaccgccggatcgctgagtttagccgaggacctgataaccgagagaccgagatcatgccatcaccggaagcctcatcacgaagagagaacgtgagaaaaaaatgtccgccgccatagacgctcgcttgcatcggcgctcggagtccggggatcaaccgtgagggcatcatgctgttctggtcctacccagtgaagtcggcgtgtgcaggaggccgcggatggttggctggtgctcgacggtccaggagctccgccattgggccatacctgcgtcgtccaccggtccttgtcttcgcctctctcgtcggtgaggcactctctttcgtattcttcatttctctgctcctccctgcacttgggcatcctcggtttgaccggggggcatcggtggtgtgcttcgccagcgtgatgtgtgctgtagtcaagtgcgagttcgtgctcgggggtaatggagccgctgtccggtgcatgcatcatcgcgtcgagttattaggaaaaggaagaagacgacacgagagccctcgatctacaaatgaatggctcggattgatgcattcgtagtacccgtgcgcgtcagccataggatctgaatccgtgggttaggaatggtccgggcctcataaaatttggggccgtcggatctcgatccagtggcgactgtcacttaccggtttgtgatctaatgccgaccgtcggattcagatcgcgtggctctgattataggatacccccttcggccttggataattgctaaagagcccctgcagtttttcttattcaacccgccatcccgtgccattataagaccattaccgtttagtcctggaatttatgcagaacccccctgggctccggtaaaattatgtccacagtccataagcctaagaaaaattcacaatttattttagaaaatgatttttaattaaaaacaatattagaaacttgtgaaattcatatttaattcattttagctccgaattgacccattccagttgcaataattttgtattaatattgtctatcaactagtaacattgtttaaccatgaaacttgaattaaaattgttcatttgaattaattcattctaggtgcttaataactccagaaattcataacttgataaccgtaactccgaatttagcggttcccgttcccacgatctcgtagcaacgcgtagattattattatgtaatttattcttatgtttggtgtaatgttaattttacctatatcatgtttgtttgtattgctacgtttagcagtgaggacacgtgtcacctaaagagcaagttggtacctggaatctcaagtcccaggcaagttgtgcccttgatcacttcttatacccactcatgttctaattaatcataatgatctgcataggttaatttgatgggacctaataggttaccctagtttgtttatcctgaataccttgtttacccctgaatcacttgggtagttctgctactgctttatatggttctgggttaatatttcattatatctatgttccaattatgttgttattttatttatgttcatgataagatcattatgttaattggaacatggagaaccacccgggaaaacagtgctaccacaagggtttaatgggacgcccttggccgattaattaggaaagctagtggaagactaccttacccgaaaggggcaagggcagtaggggagtggtcagtgtagggaggccctcgggaggattttgctgcgatggcggtcctgcaagggattcctgcattggagcttcctataaactgtagcgggttttctgaagctagtggaactttgtaaaggcctcgtagtgttaccctgcctcgcctcctcggtagaggtgtatgggaagtcgtgatcccttggaagatgggtaacatgacttgtgggtaaagatgcgcaacctctgcagagtgtaaaactggtatactagccgtgctcacggtcatgagcagctcggaccctcacatgattaatctatggaacttaaattcaatttgtcatatgcattgcatcgcaggtgatgttgttacttctgttctactatttaattgggttggtatttacttatacttagtgtcggggaccataattaggggtaccctcaagacgcctaattctcagctggtaacccccatcagcataaagctgcaaaggcctgatgggtacgattaagtcagggatcagtccacacgagtgactcgctcacgcttcacccgagcctagcctcggccaagggcagccgacctcgagagacttccgtctcgcccgaggcccccctttttacggcggacacatcaccggctcgcccgaggccttggcttcgctcagaagcaaccctgactaaatcaccacaccgactgaccaagttgcaggagcatttaacacaaaggtggcctgacacctttatcctgacacgcgccccccccggcagagccgaagtgaccgccgtcactccaccgctccactgaccagtctgacagaaggacagcgccgcctgcgccactccgactgcggtgccactcgacagagtgagtctgacagacagtcaggccttgccaaaggcgccacggcgaactccgctccgcccgaccccagggctcggactcgggctaagacccggaagacggcgaactccgctccgcccgaccccagggctcggactcgggctaagacccggaagacggcgaactccgctccgcccgacccagggctcggactcgggctaagacccggaagacggcgaactccgctccgcccgacccagggctcggactcgggctaagacccggaagacggcgaactccgctccgcccgaccccagggctcggactcgggctcggccccgaaagacgacgaactccgcctcgcccgaccccagggctcggactccgccctggcctctgccgaacgacttccgcctcgcccgacccaggggctcggactcggcctcggcaacggaagacagattagaccccagcttcggaggagcccccacgtcgcctggcctcgggcgcgggcccgccacgtcaacagggagcgccatcaccactctaccccgagccgactcgggccgcagagaacaagaccggtgtcccatctgaccagctccgccagataagcaatgatggcgcctcacaagctctgtgacgacggcggcccccagctctcttacggaagcagggcgacgtcaacaaggattcgaccactccaacagttgtccctccgccaggctccgtcgcacctccgacagccacgacatcacgccagcaaggtgccaagacttctccggctgccacattggcatgtacctagggcgctagctctctctccgctagacacgtagcactctactacaccccccattgtacacctggatcctctccttacgactataaaagggaggaccagggccttcttagagaaggttggccgcgcgggaccgaggacgggacaggcgctctcttggggccgcttgcttccctcacccgcgtggacgcttgtaacccccctactgcaagcgcacccgacctgggcgcgggacgaacacgaaggccgcgggacttccacctctctcacgctcgactccggccaccacgcctctccccccttcgcgctcgcccacgcgctcgacccatctgggctggggcacgcagcacactcactcgtcggctttgggacccccctgtctcgaaacgccgacagttggcgcgccaggtaggggcctgctgcgtgctgacgaacagctccccgtcaagctccagatgggcagtctccagcaacctctccggcccggggcggtgcttcgtttcgggactcttgagttcatgtccttcgacggcagctacgacatgatacttcttccaccgccgcgcgacgacgacaatggcggccgacaacccgcccgccggcggcggaatcgacgacatcttccccgcgtggtggaagagcaacattcgagctcgctccgttctctccccgccaacggaggaggaggcggggccatcaaggccaagcgggaggccgcgcttcgttggtcgtcgagcgaatcgacgcccccgacgccccgacggaaggcacgccggacgtcgacctcgcgttcaagacgaaggcaagcgccgtccccccgcgacacgctgaccccgagcaagaagacgacgccggcgcgctcacggaaagcctgcaggacgtcgccctcgtacctgagacgacggtgcaaccagtccccgatgtgactacgtcgctcctcgtcgaccaaaaggtaccgactaactcccatcttacgtcatttcgactcggcctcaacccgccaaacgacctcgctttggcgggcgctctcattgaggcgagtgcaaccccactagggtttcgtatgcggtcgccttgggaccggctgacggacgtctcgacctacgggccctctgggtccgaggaagatgacgatcccagcgtctgttgggatttctccggacttggcaaccccagtgccatgcgggacttcatgaccgcatgtgactactgcctatccgactgttccgacggaagccgcagccttggcgacgagagctgcggcccaagccgcgaatgtttccacatcgagctaggggatccctccaaaggcaaccatctcggcatgccggaggacggtgatcttcctaggccggtgcctcgcgccgacatcccacgggagctagctgtggtccccactccggcggggggttacgacccacaactcgagcaagtccgcgaggcgcaggccgggctcaacgagggaacaggagcacttgagccgatccgtcgggacgtcgggcaggtatgggcgggccaacccctgcccggagaaatacgtcacctgccccaaggtctccagcactgcgtcgccaacgatgtcagggtcaggccgccgcccgcatccagcgggattggtcagaacctggcagccgcagcgatgctcctccgcgcgatgccggagtcatcaaccaccgagggtcggcgaatccagggagagctcaagaatctcctggaaggcgctgcggcccgacgggccgagagcactgcctcccgaaggcagggatatccctcggaacctcacgccgcgacttcccgattcatgcgggaagcctcggtctacaccgggcgcacgcgcaacaccgcgcctgcggccccgggccacctcggcaacgagcaccatcgacgcgactgtcgggcccacctcgacgaaagggtgcgccgaggctaccaccccaggcgtggggggcgctacgacagcggggaggatcggagtccctcgcccgaaccacccggtccgcaggccttcagtcgggccattcgacgggcgccattcccgacccggttccgacccccgactactatcacgaagtactcgggggaaacgagaccggaactgtggctcgcggactaccgccttgcctgccaactgggtgggacggacgacgacaacctcatcatctgtaacctccccctgttcctctccgacactgctcgtgcctggttggagcacctgcctccggggcagatctccaactgggacgacttggtccaagccttcgctggcaatttccagggcacatacgtgcgccccgggaattcctgggaccttcgaagctgccggcaacagccgggggagtcgctccgggactacatccggcgattctcgaagcagcgcaccgagctgcccaacatcaccgattcggatgtcatcggcgcgttcctcgccggcaccacttgctgcgacctggtgagcaaggagtcaaggtgaaaggagtcaagctcaatcctgagaagtgtgtcttcggggtgccccgaggcatgctcctagggttcatcgtctccgagcgaggcattgaagccaacccggagaagatcgcgaccatcaccagcatgggacccatcaaggacttaaaaggtgtacagagggtcatgggatgcctcgcggccctgagccgcttcatctcacgcctcggcgaaagaggtctgcctctgtaccgcctcttaaggaaggccgagtgtttcgcttggacccctgaggccgaggaagccctcggcaacctgaaggcgctccttacgaaggcgcctgtcttggtgcccccggcggatggggaagccctcttggtctatgtcgccgcgaccactcaggtggttagcgccgcgattgtggtcgagaggcaagaagaagggcatgcattgcccgttcagaggccggtctacttcttcagcgaagtgctgtccgagaccaagatccgctacccacaagttcaaaagctgttgtatgctgtgatcctgacaaggcggaagctgcgacactacttcgagtctcatccggtaactgtggtgtcatccttccccatgggggagatcatccagtgccgagaggcctcgggcaggatcgcaaagtgggcggtggaaatcatgggcgaaacgatctcgttcgcccctcggaaggccatcaagtcccaggtgttggcggacttcgtggccgaatgggttgacacccagttgccgacggctccgatccaaccggagctctggaccatgtttttcgacgggtcgctgatgaagacaggagccggcgcgggcctgctcttcatctcgcccctcggaaagcacttgcgctacgtgctgcgcctccatttcccggcgtccaacaatgtggccgagtacgaagctctggtcaacgggttgcggatcgccatcgagctaggggtcagacgcctcgacgcccgcggcgattcgcagctcgtcatcgaccaagtcatgaagaactcccactgccgcgacccaaagatggaggcctactgcgacgaggttcggcgcctggaagacaagttcttcgggctcgagctcaaccacatcgctcggcgctacaacgaaaccgcagacgagctggctaaaatagcctcggggcgaacgacggtccccccggacgtcttctcccgggatctgcatcaaccctctgtcaagatcgacgacgcgcccgagcccgaggtaccctcggctcagcccgaggcaccctcggcacagcctgaggtaccctcggcccccaagggcgaggcactggacgtcgaggaagagcagagcggggccatgccagatcgagattggcaggccccgtacctgcaatatctccgtcgaggagagctaccccccgaccaagtcgaggctcggcgggtagcgcgacgcgccaagtcgttcgtcctgctgggcgatgaagaggagctctaccatcgcagctgaaagggaaatgtgcccttgggccatttctaagtattttggtgattgagtgccaactcaagtgcttaaatgtgaatttacgcaatggatgaacaaagtgcaaatctagagcaaaggtatgtttctaagtcttagtacattggttttgtgtactaatatatttgtctaagtgttagaaacagaaagaaggagagaggagaagacttggctgtgtgcagccaaggagctgcttcggtctggggcaccggactgtccggtggtgcaccggacagtgtccggtggtgcaccggacagtgtccggtgcgccaggccgcctcggccgaagaggccgctctcgggtttttctccggcgacttcggctaaaattcaccggactgtccggtgtgcaccggactgtccggtgagccaacggtcggccgggccaacggtcggccgcgcgatcggcgcgcgacacgtggccgagccaacggtcggaaggaagcaccggactgtccggtgtgcaccggacatgtccggtgcgccaactgtgcgcagatctgcatcagatatcaacggtcggatgtgctgtttaaggaaacaaatcgggcaccggacagtgtccggtgtgcaccggactgtccggtgcgcccgacgacagaaggcaaggatagccttccagatgtgttctcaacggctcctagctgccttggggctataaaagggacccctaggcgcatggaggagtacaccaagcattcctacaactcttctaagcaccaagacaccaatctcacgcattcgtttcattgtgatagcatatagagctcttgtggagttgtgaactctttgtgttgcgttgcgagctcttgttgcgacttgtgtgcgtgtgttgctctgactttcgagtcttgtgtgcgttgctcattcccaccttactccgtatttctttgtgaactcaattgtaagggcgagagactccaagttgtggagattcctcgcaaacgggaaaagatcaaaggaaagaaaaacaccgtggtattcaagttgatcattggatcacttgagaggagttgagtgcaactctcgtccgttgggacgccacaacgtggagtaggcaagttttgtacttggccgaaccacgggataaccaccgtgtcaactctgtgattgatttcttgtggttatcgtgttttgagttctctctagccacttggccatacttgtgctaacccttaacaagtttttgtggcttaagttttgaacttttacaggatcacctattcacccccccccccctctaggtgctctcaattggtatcggagccgttctcttcaagaaagggactaaccgcccgaggagatggatcctaaggggaagggaattgtgatcaacgacaaggagaaggagtccttcgtcaacgagccaagggatgacaagtccaatgactcgggctcgggccacaagcgaaaagatgggaagaagaagaagacaagacgcatcaaggagatcgtctactacgacagcgatgagtcctcttcttcccaaaaggacgacgaccacgacaaacaaaagacggttaactcaaacttttcttttgattattcgcgtattccgcaaagttcaaattcacatttgctttccattccactcggcaagcccccacactttgatggggaggactacggattttggagccacaaaatgcgtagtcacctattttctctccatcctagtatatgggagattgtagaaagtggaatgcactttaatagttcggatagtcctgtattcattaatgagcaaatccataagaatgcacaagctactactgttcttctagcttcattgtgcagggatgaatataacaaagtgagtggcttggacaacgccaagcaaatctgggataccctcaagatctctcatgagggaaatgacgctaccttgctcaccaaaatggagttggtggagggcgaacttggaagatttgctatgataaggagggaggagccaacccaaacatacaaccggctcaaaacccttgtcaacaagataaggagctatggaagcacgcgatggacggaccacgacgtcgtccgcctaatgctaaggttctttaccgttcttgatcctcatttggttaataatattcgtgagaatcccaggtacaccaaaatgtcgcccgaagaaattcttggaaaatttgtgagtgggcgaatgatgatcaaggaggcaaggtacgtggacgacgcgttgaatggtccaatccatgagcctcaacccattgccctcaaggcaacaagaagcaaggaagcgctacccagcaaggtggcgcaaattgaggcagccggtcttaatgatgaagaaatggccctcatcatcaagagattcaagacggtgcttaagggtcgcaatggacagccgagcaagactaagaccaaggggaagcgatcatgcttcaaatgcggtaagcttggtcattttattgctaactgtcctgataatgaaagtgaccaggaaaaggggaacaaaagggagaagaagaagcactacaagaaagccaagggcgaggcgcatctaggcaaggagtgggattcggattgctcctcctccgactccgacaatgagggactcgccgccaccgccttcaacaaatcaaccctcttccccaacgagcgtcacacatgccttatggcaagggagaagaaggtatgtactcgcaacactacctatgcttcttcaagtgaggacgaatctagtgatgaggatgaagtagattattcatgtttgttcaagggcttagatagatctaagatagacaaaattaatgaattaattgatgccttgaatgaaaagaatatacttttagaaaagcaagaggatttgttatatgaagaacatgataagtttgtagaggctcaaaaatcccttgcattagaaattaagagaaatgaaatgcttgcttgtgaagtgtcaacatgccatgattcaatttctaaattaaagagcattaatgatgacttaaatgctaaactagtagaagcacataaatccaactcttgttttgaacatgttgaaatttgcactaggtgtaaggatgttgatgttaatgcttgtagtgaacacgtagtttccatttcaaaattgaatgatgaattagctagtcttaatgcccaacttaagactagcaaaagtgattttgagaaactaaaatttgctagggaggcctacacggttggtagacacccctcaattaaggatgggcttggcttcaagagggaagccaaaaacttgaaaagccataaggctcccatccccgccaaggagaaagggaaggcccctatggctactagtgctaaaatgaaccatgcatttttatatcatgatagaagacaaactagaaatgtaagtcatgatgcttttgattcatatgtttatgattctcatgccatgtttgctcctagttcctcttatgtgtatgatagaaatgttactaggagaaatgttgttcctaaaagaaatgctattcatcatgtgcctagaaggaatgttattcatgctcctaggaaaatagcaaatgaaccttctacaatttattgtgctttgaatgcttcatttgcaatttgtagaaaggatagaaaagtaattgctaggaagttaggggcaaaatgcaagggtgataaaacttgcatttgggtccctaaggaaatcatgactaaccttgtaggacccaacaagagttgggtacctaagacccaagcctaaatttgccttgcaggtttatgcatccgggggttcaagctggattattgatagcggatgcacaaaccatatgacgggggagaagaaaatgttcacctcctacgtcaagaataaggattcccaagattcaatcatattcggtgatgggaatcaaggcaaggtaaaagggttaggtaaaattgcgatttctaatgagcattctatctctaatgtatttttagtagagagtcttggatataatttgctatctgttagtcaattatgtcatatgggatacaactgtctgtttacaaatatagatgtgtctgtctttagaagaagtgatggttcactagcttttaagggtgtattagacggcaaactttatttagttgattttgcaaaagaagaggccggtctagatgcatgcttaatggctaagacttgcatgggctggctgtggcatcgccgcttagcacatgtggggatgaagaaccttcacaagcttctaaagggagaacacgtgataggattgactaacgtgcatttcgaaaaagatagaccttgtgcagcttgtcaagcaggtaaacaagtgggaggagcacatcacagcaagaacgtgatgaccacttcaagacccctggagctgctgcatatggacctcttcggacctgtcgcctatctgagcataggaggaagtaagtatggtttagttattgttgatgacttttcccgcttcacttgggtgttctttttgcaggaaaagtccgaaacccaagggactctcaaacgcttcctcaggagagctcaaaatgagtttgagctcaaagtgaaaaagataaggagcgacaacgggtccgagttcaagaaccttcaagtggaggagttccttgaagaagaagggatcaagcacgagttctccgctccctacacaccacagcaaaatggtgtggtagagagaaagaacaggacgctcatcgacatggcaaggacgatgctaggagagttcaagacccccgagtgcttttggacggaagccgttaacactgcttgccacgccatcaacagggtctaccttcatcgtctcctcaagaagacgtcgtatgagctactaaccggtaacaaacccaatgtatcgtactttcgtgtatttgggagtaaatgctacattctagtgaagaagggtagaaattctaaatttgctcccaaagctgtagaagggtttttgttaggttatgactcaaatacaaaggcgtatagagtcttcaacaaatcatcgggtttggttgaagtctctagcgatgttgtatttgatgagactaatggctctccaagagagcaagttgttgattgtgatgatgtagatgaagaagatgttccgacggccgctatacgcaccatggcgattggagaagtacggccacaggaacaagatgagcaatatcaaccttcttcctcaattatggtgcatcccccgactcaagacgatgaacaggttcatcaaaaggaggcgtgtgatcaagggggagcacaaggtgatcaagtgatggaggaagaagcgctaccggcacctccaacccaagttcgagcgatgattcaaagggatcatcccgtcgatcaaattcttggtgacattagcaagggagtaactactcgatctcgattagttaatttttgtgagcattactcctttgtctcttctattgagcctttcagggtagaggaggccttgctagatctggactgggtgttggccatgcaggaggagctcaacaacttcaagcgcaatgaagtttggacactggtgcctcgtccgaagcaaaatgttgtgggaaccaagtgggtgttccgcaacaaacaggacgagcacggggtggtgacgaggaacaaggctcgacttgtggcaaaaggttatgcccaagtcgcaggtttggactttgaggagacttttgctcctatggctaggctagagtcaattcgtatcttgctagcatatgccgctcaccattctttcaggttgtaccaaatggatgtgaagagcgctttcctcaatgggccaatcaaggaggaggtgtacgtggagcaaccccctggcttcgaggatgaacggtaccccgaccacgtgtgtaagctctctaaggcgctctatggacttaagcaagccccaagagcatggtatgaatgccttagagactttctaattgttaatgctttcaaggttgggaaagccgatccaactctttttacaaagacatgtgatggtgatttgtttgtgtgccaaatttatgtcgatgatataatatttggttctactaaccaaaagtcttgtgaagagtttagcagggtgatgacgcagaaattcgagatgtcgatgatgggcgagttgaactacttccttgggttccaagtgaagcaactcaaagacggcactttcatctcccaaacgaagtacacgcaagatttgctaaagaggtttgggatgaaggacgccaagcccgcaaagacgccgatgggaaccgacggacacacagacctcaacaaaggaggtaagtctgttgatcaaaaagcataccggtcaatgataggttctttgctttacttatgtgctagtagaccggatattatgcttagcgtatgcatgtgtgctagatttcaatccgatcctaaggaatgtcacttagtggcggtgaagcgaattcttagatatttggttgctacgccttgcttcgggctttggtatccaaaggggtctacctttgacttagttggatactcagactccgactatgctggatgtaaggtcgataggaagagtacatcggggacgtgccagttcttaggaaggtccctggtgtcatggaattctaagaaacaaacttccgttgccctatccaccgctgaggccgagtatgttgccgcaggacagtgttgcgcgcaactactttggatgaggcaaaccctccgggactttggctacaatctgagcaaagtcccactcctatgtgacaatgagagtgctatccgcatggcggagaatcctgttgagcacagccgcacaaagcacatagacatccggcatcactttttgagagaccaccagcaaaagggagatatcgaagtgtttcatgttagcaccgagaaccagctagccgatatctttaccaagcctctagatgagaagaccttttgcaggctgcgtagtgagctaaatgtcttagattcgcggaacttggattgaattgtagcatacatgtgtttatgcccttgatcaggttcattctgcattttgttgcttactgtggtgctcaagttgtacaaacactccctggacctcacaagtccgttgcaaagtgatgcacatgtttagggggagatgtgttacaacttgaccctttgagactaaccatttgcttgagtctgcttgatttagtctcgaaggagaattgaaagggaaaaggtggacttggaccatgaaagacttccactgcactccgatgagagggtaatttatttcaagttcatctctatgatcttattgcctttgtactcttaattgaagattttggtgaggcaatggggttaaaaggccacgattgatcccgttttggtgcttgatgccaaagggggagaaaataaaggccaaagcaataaatggatcagctaccacttgagaaattttgaaaatagtagaatagagtttttgttttgtcaaaagcttttattgtatcttattgtctctattgtcaaaagttggcttcttgtggggagaagtattgattatgggatttagggggagtttttgaaatctttgatcaatctcttttgaaatgactctctttatgcttcaacatgtgtgtttgacttagagatagagatttgagtctgatttgcaaaaacaaaccaagtggtggcaaaggatgatccatatatgccaaaattgaaccaaaaccaatttgagttttcatttgaagtgattttgcacttgttctagttgctttatgttgtgttggcataaatcaccaaaaagggggagattgaaagggaaatgtgcccttgggccatttctaagtattttggtgattgagtgccaactcaagtgcttaaatgtgaatttacgcaatggatgaacaaagtgcaaatctagagcaaaggtatgtttctaagtcttagtacattggttttgtgtactaatatatttgtctaagtgttagaaacagaaagaaggagagaggagaagacttggctgtgtgcagccaaggagctgcttcggtctggggcaccggactgtccggtggtgcaccggacagtgtccggtggtgcaccggacagtgtccggtgcgccaggccgcctcggccgaagaggccgctctcgggtttttctccggcgacttcggctaaaattcaccggactgtccggcgtgcaccggactgtccgatgagccaacggtcggccgggccaacggtccgccgcgcgatcggcgcgcgacacgtggccgagccaacggtcggaaggaagcaccggactgtccggtgtgcaccggacatgtccggtgcgccaactgtgcgcagatctgcatcagatatcaacggtcggatgtgctgtttaaggaaacaaatcgggcaccggacagtgtccggtgtgcaccggactgtccggtgcgcccgacgacagaaggcaaggatagccttccagatgtgttctcaacggctcctagctgccttggggctataaaagggacccctaggcgcatggaggagtacaccaagcattcctacaactcttctaagcaccaagacaccaatctcacgcattcgtttcattgtgatagcatatagagctcttgtggagttgtgaactctttgtgttgcgttgcgagctcttgttgcgacttgtgtgcgtgtgttgctctgactttcgagtcttgtgtgcgttgctcattcccaccttactccgtatttctttgtgaactcaattgtaagggcgagagactccaagttgtggagattcctcgcaaacgggaaaagatcaaaggaaagaaaaacaccgtggtattcaagttgatcattggatcacttgagaggagttgagtgcaactctcgtccgttgggacgccacaacgtggagtaggcaagttttgtacttggccgaaccacgggataaccaccgtgtcaactctgtgattgctttcttgtggttatcgtgttttgagttctctctagccacttggccatacttgtgctaacccttaacaagtttttgtggcttaagttttgaacttttacaggatcacctattcacccccccccctctaggtgctctcagcagcccctcgggcatcctccagcgatgcatctccatcgccgaaggtcgggaactgctgcaagaaatacactcgggggcttgcggccatcacgcagcgccccgagcccttgtcgggaatgctttccgacaaggcttctactggccaacggcggtgactgacgccactagaattgtccacacctgcgaagggtgccaattctatgcaaagcagacccacctgcccgctcaggctctgcagacaatacccatcacctggcccttcgctgtatggggtctggacctcgtcggtcccttgcagaaggcgcccgggggctacacgcacctgctggtcgccatcgacaaattctccaagtggatcgaggtccgacctctgaatagcatcaggtccgagcaggcggtggcgttcttcaccaacatcatccatcgctttggggtcccaaactccatcatcaccgacaacggcacccagttcaccggcaaaaaattcttggatttttgcgaggatcaccatatacgggtggactgggccgccgtggctcatcccatgtcgaatgggcaagtagagcgtgccaacggcatgattctacaagggctcaagcctcggatctacaacgacctcaacaagttcggcaagcggtggatgaaggacctcccctcggtggtctggagcctaaggacgacgccgagtcgtgccacgggtttcacgccgtttttcctggtctacggggctgaagctatcttgcccactgacctggaatacggctccccgaggacgagggcctacaccgatcaaagcaaccaagctagccgagaagaatcgctggaccagctggaggaggctcgggacagggccttactacactcggcgcggtaccagcagtccctgcgacgctaccacgcccgaggggtccggtcccgagacctccaggtgggcgatctggtgcttcggctgcggcaagatgcccgagggaggcacaagctcacgcccccctgggaagggccattcgtcatcgccaaagttctgaagcccggaacatacaagctggccaacaatcaaggcgagatctacggcaacgcttggaacatcaaacagctacgtcgcttctacccttaagatgtttccaagttgttcatatacctcgcacctacgcaaagtttagtcgtcaaggaagggccggcctagcctcggcaaagcccgaccctccctcgggggctaaaagggggagaccccctctgcgtcgaatttttcctcgaaaaaggatctctttttagcaggattactttcgtgcttcttgactacttcggaaagcggatcctggaaacgacggattacacgtaagcagccaaggctgaccgagccgagggactcctacgcctccgggatacggatacctcactcatcaccttctgcaataagtaactcgcgctcggataaagcgactccgtggactgaacaagtcttcacgttcggaagctctcctgccgaagcagtccttcaagctttctcgactaagtcggggacagggcctcatggacgggtgaaagtacgcgtaagcggcaaggccgaccgagccgagggattcccacgcctctgggatacggatacctcactcgtcccttctgcgagaagcaactctcgctcgcacaaacatccctgttaccgacagagtccagatgctcgaaacaaggggaaaaagacgcagcttcgcaagcacggcgagggtgtgttttctggcctcggcggccgcagaaggcacacgctacaagacgatctgatcctgcaggctcgggtcttcacgctgaagggagccgtaacaccctcggcatcgacgacgtcttcagctaagtccgacccagcctcggacggcgatgcggtccagggacccctccgggaatccggcccgagcaggcggctcggccggttacccctggggcctcggccaaccggcttccaagggcgccagcccgacccgaggcctcggcggatcgactttggcgtcggctccgctgacggacaacatggctaggctccggccaaccaggttcccattctcgagccaactccgcctctgttcatactgatatcgctacccctggcctcggctcatcgaagggcggccgaggggtctctttaactaagctagaggagccccagacaacaaggccgatcgggccgagggattcctacgcctccgggatacgggtacctcactcgtcaccttgacacggggcgactcatgctcggtaaagcggttcagataatcaacagacgagacttagtgctcgaaaatgaggaaaaaacacggctccgtgccgaaattacatacatgttcaggccccgacagccgcaatgaacaaactccccggcattcgagatgccattacaaacggaactccggttccccctccgcaggtacgaacgaccccactccatggggaaggcctgcggagcaacagaagactgacgagcggctcgccgctgcccgttctgactacggcgacagtggaccggcgttgctgcgatcttgccctcgcccccgccgacgctcgaggggcgaggacaagtacgccggcgcgatggcccggggcgcgggtggtggcagtgatcccgtcggcgacgaggacttctcgagccgcctccgcctcggcgccgatggcaggggacaccagccccccggtagatccccactcaaatcctcccggacaagtggggcaccggcctctgcgcgagggcgccgtcccagtgcaaaagcagaaccaccccagaacacgaacgccgccctaacggcgtgcggcatcgtgggtggtcctcccgtgcacacggcgcggcggtcgccctccggcaggaggggccgccggaagcccggccaacgactccgacacgctggaggtgacgacgcccgccgtcgatcagccccacgttgtctaagtccgcgccgtccacagggccagcgagcgcctccacccccgaacgccgcggaaaagggtgacccgcggacccgcgcgggaggtagggcgccggctcagcgtggcccccacctcagcgaggatgatgaacatccttgaagctgagggtgggaccaagatcgcagcccggcttgctcttccccacccagaaactggtggtcaccatcctgggtgatcgccggcgtaggggtgcggccgggccggctgatgaaaatccttgaagccgaacgatggctgaaaggtaccaactcccatggagttgcgttcctccaacgaggaggcggaaaggcggcggataccccccatccgggggcttggaagatggaaagacacgacgcataagggaggaagaagacatggttgccttctgaaaggagtctccctccttttaaaggcaactctccctacgtgcgcccccagaacgccgcgggctgagtcttctccaatacgctccaaggccctcccctgcgactcgggggctgggtcccgcatgtcatgcaaaccagctcagggcagaagaagccaaaccgccgcgcgtggtgcgcacgaccgtccagcggttacgagcgaccccccacttttgcccagaccaacgggcggaagggacgggcagccatgcaggcggcatgcaaccgcgccaggtggacgcgcttctccgacttctgacacgccagcttggaagcccaggcccacgcgtcaagcaaccggcgcgccagttgctgcatgcaggcaaccgcaccgccacctgtgccaccgtcgcgcctcttcgattgcggagcccatgccgcgactcgaggcgacccagcagtgccaacctggcgcgttggtcaaagcgaccgaaagtgggccggcagtaatggcggtggcaggcgggcgggcgcagcagtcacgtcgtcagccaggctcacgtctcatcctgggacagcaagagagcctcctcccacggcgtgaagacggtgcacccgtgacccgttcctcgaacggatcgcgcacgcgcaacggccgccccgccaaccactcgccccgtcgcattaactccgcggcgggacaggcggcgcctctgacgggaggagcgcgcgacgcttcaccttcgccgtaataaccgcgtcagaaaaggtacgccacgtcgttcgatttcgtatccttttcctttttcctctttctctatctcttgcaacagggaccgggaaagggggataccccgaaaaggatccttttccgcgaaggaaccgggctccgagccccccctactgatcaggggttcgaagactggccctccgaagggttcaacagtcgcctcagatcgcgtgggcccgacacccactactggtcaggggttcgaaggccagccccccgaagggttccatggccgcctcaggctactcgggctccgcgcccattactgatcaggggttcgaaggctggcccccgaagggttcacagtcgcctcagacaccgagcgagggatgaccaggggtacgttcgatacataaccgaggctcgggctgtgctcccgaggtaccctaggacatttccgagaccagcgggaacgatcttgtaacggaatcccatcggagggaggcatcgagccctcggaccccgtcgccaggggaccgggtccggcaaatcacctgcaggtacttttgggcgtgcctctgggcccctagccgacccccaacgaacggggcacggacgtccactcggattacccgcttgcagctcaccggagacaccatgttcggtgcccatcgagggtaacatggcgcactccccccctcctccttgcggaaaggcgacgtaagggcgtatgtaaaaagtcgagtctgtccctgatcgtcctctcgccctgtgcagaggctcgggggctgctctcgcaaaaaccggctccggccaaaccgttgacagcgtcaacataccagcccgagagcttgggccccgaccgtgcacccgggctacagccagttcgcatgagggaacgaccagaccagccgaagcattacgcgaggtattaagacctcgaaggagtgtaaccactcctccgaggcctcgggggctacacccggcgggtgcgctcgcgcgcacccaccggaacaaaatgcaaccgagaaaggctggtccccttgcaaaaaagtgcgacgaaagcctccaagcgagtgctaacactcccttcgaggctcgggggctactgtcggggaccataattaggggtaccctcaagacgcctaattctcagctggtaacccccatcagcataaagctgcaaaggcctgatgggtacgattaagtcaaggatcagtccacacgagtgactcgatcacgcttcacccgagcctagcctcggccaagggcagccgacctcgagagacttccgtctcgcccgaggcccccctttttacggcggacacatcaccggctcgcccgaggccttggcttcgctcagaagcaaccctgactaaatcgccacaccgactgaccaagttgcaggagcatttaacgcaaaggtggcctgacacctttatcctgacacgcgcccccccggcagagccgaagtgaccgccgtcactccaccgctccactgaccagtctgacagaaggacagcgccgcctgcgccactccgactgcggtgccactcgacagagtgagtctgacagacagtcaggccttgccaaaggcgccacggcgaactccgctccgcccgaccccagggctcggactcgggctaagacccggaagacggcgaactccgctccgcccgaccccagggctcggactcgggctaagacccagaagacggcgaactccgctccgcccgacccagggctcggactcgggctaagacccggaagacggcgaactccgctccgcccgacccagggctcggactcgggctaagacccggaagacggcgaactccgctccgcccgaccccagggctcggactcgggctcggccccagaagacgacgaactccgcctcgctcgaccccagggctcggactctgccctggcctctgccgaacgacttccgcctcgcccgacccaggggctcggactctgcctcggcaatggaagacagattagaccccagcttcggaggagcccccacgtcgcctggcctcgggcgcgggcccgccacgtcaacagggagcgccatcaccactctaccccgagccgactcgggccgcagagaacaagaccggtgtcccatctgaccagctccgccagataagcaatgatggcgcctcacaagctctgtgacgacggcggcccccagctctcttacggaagcagggcgacgtcaacaaggattcgaccactccaacatctgtccctccgccaggctccgtcgcacctccgacagccacgacatcacgccagcaaggtgccaagacttctccggctgccacattggcatgtacctagggcgctagctctctctccgctagacacgtagcactctgctacaccccccattgtacacctggatcctctccttacgactataaaagggaggaccagggccttcttagagaaggttggccgcgcgggaccgaggacgggacaggcgctctcttggggccgctcgcttccctcacccgcgtggatgcttgtaacccccctactgcaagcgcacccgacctgggcgcgggacgaacacgaaggccgcgggacttccacctctctcacgctcgactccggccacctcgcctctccccccttcgcgctcgcccacgcgctcgacccatctgggctggggcacgcagcacactcactcatcggctttgggacccccctgtctcgaaacgccgacacttagtaatggctaataaaattttgaccaactttaaaagcaatgctcagcttcagccatcctctttggtaagccttacacttcacatgagctcccacctttggcgagttcatacacattattccccacaacttgttgagcgatgaacgtatgtgagctcactcttgctgtctcacacccccccacaggtcaagacacaggtaccacaggatgaggcacgtggaggatgctgtgatgagatcgtgagaggtctaggtcgtcgtctcccagtcactttgggttgctggaccattgtctccttataatgtaattatttattttgtatagaactcctgttatatataaagatgtgacattcgatcctgtgccactatacatcatatgtgtgagacttggtcccagcacacctggtgattatgttcgcgcccgggttttggaccctaaaattcgggtgtgacagaagtggtatcagaggaatgttgactgtaggacgaaacctagatagaactggacaaccattctttacttacccttgctactctgattcttttctaaacttttcttaatcttttctcatctatttccgctttactctgattattcttaccttttcattctaaagacaaatgtggatttcacactttgaaatcctgtgcctaaagtggctttaggaataggagacctactcttaggaacaaaaacaaaactatttttataggtatttgtatgcttgaatgtttgttcttatgatacttgtttgatttggatctttgattgagtgtgattagttgtggagtaatgtccacaatcacatctgcatatacatatagaaaaaaacggttataaaaatatctaaatgaactaggttatccctcatcaaagaatctagcctagcaaaatccatcttatcttgaaaaagtctatcctacactcatagatccatcttatcctaaaaaaatagattctcatcttatcttgaaaagatttatcttatcctaatagatctatctgacctcaaaagattctaccttatccttatggattcatcttaccccaataagcatatttatcccacgctagtgtaacaaccatgatctagcctaaaataaataagatcttatctagtcaaactagtcacaccaatctaacctagatctgatctaatctaaagtgacttatcaaacatgttagataatactgatgaaatagattagactctactcctatagaacaagtcttaacttagttcaccctgcactaaattaagaatgacagatcgacttggccatatgcaactaccttaaccatccgatagttgcataaaccctcaattttaacctagcaagagattctaacctacctacaccatataatccatcctactcacatatatcctaaccatatgtccttaactcggatggcaactccaagatgaaagaccaaaggagaccaaccacgtcaaagaaagataagcatcaactcaagacttaaaagatcaagttgaattgccagcggaatcaagatccacagttcaggatgaagtctttccttatcatactcttccttgccacaacctatacttgccataatcgtacctcatatgacctaatagatggctagacatatatgtctatattttccaaatcatctactagctagtataaagaaaaacatgaaacaaaacttttgattcctaaaccaaactggttgcatcccttttctacaaatctcgaggacgagatttcttttaaggggggtaggatttgtaaagcccaaacttggtagagaaaaaaaatcatgaaataaataagttttggcaatactaaaatattattaactaaatataaatcctaaaacattagaatggaatagtcctctcatgaactacaatattcgggataccttcgaagtcttttctcctaaatttaaaataatttctaacaaaaagttgaataaaaaatccctatatgaatttagttatccccttgtttaagtaatctacaaagattttgtacccttcccatttttttttcttgtatggattgcatatttaagagcatttgttgaaaatgataattaatacataaagaaataaagtactaactacgcatcatgtcggagttttaagtcgtgcatatagcttttcttgaacttatatttgaattagaataaaaaaactgaaattaaacagaattgagaaaatagagagtaataagaaagaaatggtgagtctcacctcttccgtgagtgtggctgtttggcccacttctctataaagctagcccaagccacaagcccacgtccccttcatgtgtgtatttttttatcttttctttatttctcaaactgtatactgtgtcgtcctggtcagcacttaattcctaacgtacgctcgagttgtcactagttttgtggggcttctgggtcagccgttcatcgtatccaccggatcatcgcaacagaattgctgctcgcgcatgccgatggtcctcaccgccatgcagaacctgttatctagatttatctccttcccgagtctggtgatgttgatcccatggtttccgcgactccgttgctagcagatcaaatagccaggacgcaatccctcctcggtatataaataaccgagccccttctcaaccgccggatcgctgagtttagccgaggacctgataaccgagagaccgagatcatgccatcaccggaagcctcatcacgaagagagaacgtgagaaaaaaatgtccgccgccatagacgctcgcctgcatcggcgctcggagtccggggatcaaccgtgagggcatcatgctgttctggtcctacccagtgaagtcggcgtgtgcaggaggccgcggatggttggctggtgctcgacggtccaggagctccgccattgggccatacctgcgtcgtccaccggtccttgtcttcgcctctctcgtcggtgaggcactctctttcgtattcttcatttctctgctcctccctgcacttgggcatcctcggtttgaccggggggcatcggtggtgtgcttcgccagcgtgatgtgtgctgtagtcaagtgcgagttcgtgctcgggggtaatggagccgctgtccggtgcatgcatcatcgcgtcgagttattaggaaaaggaagaagacgacacgagagccctcgatctacaaatgaacggctcggattgatgcattcgtagtacccgtgcgcgtcagccataggatctgaatccgtgggttaggaatggtccgggcctcataaaatttggggccgtcggatctcgatccagtggcgactgtcacttaccggtttgtgatctaatgccgaccgtcggattcagatcgcgtggctctgattataggatacccccttcggccttggataattgctaaagagcccctgcagtttttcttattcaacccgccatcccgtgccattataagaccattaccgtttagtcctggaatttatgcagaacccccctgggctccggtaaaattatgtccacagtccataagcctaagaaaaattcacaatttattttagaaaatgatttttaattaaaaacaatattagaaacttgtgaaattcatatttaattcattttagctccgaattgacccattccgttgcaataattttgtattaatattgtctatcaactagtaacattgtttaaccatgaaacttgaattaaaattgttcatttgaattaattcattctaggtgcttaataactccagaaattcataacttgataaccgtaactccgaatttagcggttcccgttcccacgatctcgtagcaacgcgtagattattattatgtaatttattcttatgtttggtgtaatgttaattttacctatatcatgtttgtttgtattgctacgtttagcagtgaggacacgtgtcacctaaagagcaagttggtacctggaatctcaagtcccaggcaagttgtgcccttgatcacttcttatacccactcatgttctaattaatcataatgatctgcataggttaatttgatgggacctaataggttaccctagtttgtttatcctgaataccttgtttacccctgaatcacttgggtagttctgctactgctttatatggttctgggttaatattttattatatctatgttccaattatgttgttattttatttatgttcatgataagatcattatgttaattggaacatggagaaccacccgggaaaacagtgctaccacaagggtttaatgggacgcccttggccgattaattaggaaagctagtggaagactaccttacccgaaaggggcaagggcagtaggggagtggtcagtgtagggaggccctcgggaggattttgctgcgatggcggtcctgcaagggattcctgcattggagcttcctataaactgtagcgggttttctgaagctagtggaactttgtaaaggcctcgtagtgttaccctgcctcgcctcctcggtagaggtgtatgggaagtcgcgatcccttggaagatgggtaacatgacttgtgggtaaagatgcgcaacctctgcagagtgtaaaactggtatactagccgtgctcacggtcatgagcagctcggaccctcacatgattaatctatggaacttaaattcaatttgtcatatgcattgcatcgcaggtgatgttgttacttctgttctactatttaattgggttggtatttacttatacttagtaatggctaataaaattttgaccaactttaaaagcaatgctcagcttcagccatcctctttggtaagccttacacttcacatgagctcccacctttggcgagttcatacacattattccccacaacttgttgagcgatgaacgtatgtgagctcactcttgctgtctcacacccccccccccccacaggtcaagacacaggtaccacaggatgaggcgcgtggaggatgctgtgatgagatcgtgagaggtctaggtcgtcgtctcccagtcactttgggttgctggaccgttgtctccttataatgtaattatttattttgtatagaactcctgttatatataaagatgtgacattcgatcctgtgccactatacatcatatgtgtgagacttggtcccagcacacctggtgattatgttcgcgcccgggttttggaccctaaaattcgggtgtgacaaaacatgagcgtttgtaaagtacttcctctcttttaaattctaagacactttgatcaatagttacaccaagcctcagtcgccccctagaccgtgcccaacagctaggcacatgcagtaggccgcgtcccaacgcgcatcagtcaaacccccggtccaacacccaccctccagcgtggcacacacacacataaattgtgggttttttgcacaaatagcgtaaatagttcacagtaaaagcgtaaatattttatagagatagcataaaaaaccctcctagccactagaccatgtccacacgcccaggtgcatgcatgcatgcagatcatatttttatggtagatccgataattatggcagatcatgggagtttacatatatgcacacaaaaattgcattgctccaaaaatataggatcgctccaactgtcatgcagctagactcattagaactagtttatgatatatactcatactaattatgttacgtggtgtacgtatttatgcaattaggtacactacgtaaaaatttgttttctgctgcatgcgcacaaatttaggattgcggtaatgtgatgaaaggaaatggattagcatgcatggaaacaaaaaaaatcttatgtaaaattctttatttcatccataaatctaggatcactccaacagtcatgcagttaatctcattagaacccatttatgatatatactaatactaattatgctacacggtgtagctatttatgcaatacggtacattgcgtaaaaatatggcatgcgattcactggtaaatgtatctccatgttcgagcataaaaccttcagttttgtgcataaaaacttgcagttgtgagcataaatactgatccaacatgaaagatgttgaaaacctcttgatgttggcataaatatgtatacaaagtgacataaaaatgtgcacgtgattatatgtttttcctccactaggaacatgcatacaggcgcgtcccctaccatatgcacacatgttgtcctatttttatggcaggtctgaaaaatacgggaatcactaggcacatgtatgtgattcctatttttatgtagatccaaaaattatgtcaggtcgtcagagttttattgcatgcacacaaatttatcttgaaagtagtgtttccatggcctataatataatgtgtgtgttatggacaaatattacacagaaatccaaagacaaccccctagatgatatatcatagtaatttgaagtcgttagcaaccttaccagcaatccttaggcgaaggcggttgcttggagtcattgcgggaaggcggctgcttggtgtccatggcgaaggcgaggaaggcgactatgctacggaagatcgatgagggtgcagggaagcctctaggtgaggaacggatgcgggagcacaaccatgccccaggagagtggtggcatcatgtctatggataaaggtgatgcagcaggaggttctctagcggtgcgatatctggttcgggtctgcatggatggtaggagatatatatggtgcatattagtatcaattcttacgcaaaactggtactaaagctcagtctttaataccgattcttgtttaaaactagcactaaagactaagtttgagtgccggttctaaaagaactggtgctaaactaatattgacacaaattctaattgcgcgtgtagaaaagtaaaatcacttttagtaccggttgtatataataaccggtgtactaaaagcctctctggtttatgaaccggtattaaaggttttgaatcggctcgtggattgaaccagtacctcatattagcactggttgggaacaaaagccagtactaatttcttttgtatcgatctccacatttaaaacaggcacggaagctggtgtcaataccggttttaaataactgaaataaaagttgttagaccaaaaccctattctccggtattctcatttgcgtctcgcgcgcattttttacattacattattattacaggactatacagattggtggatcaattttttatcctccgtacgtccatgtgcaagacagactgtaatataacttgaataatgtacatgatgctcctataaatagctaggagggttcgttgtcgccgtcgaccagcaaaagctagctagctagagaggcgaagtaactttgaagcaagcagtaaattaacccaccttattatcagttctttaccgattaattcttcagctagtttcatccctagcttaattaatttttccccttcgagctagcaatggccatccaaaagccatacaatacaacatgagcacggtggctctaacggtactagtcctacttgtagcctgcagtcaagtcatatcagctcattccctagtactgcagcggtcgtcgtcagctaccacgaaagcagcagccgcagggatgatggagggcacgatcattccttaatggggtgttggtttgagaaatgaggtagtccatatcttctcacttctcacttttttgtttggtttgtggaatagagtgagttaatccatcaccaccttattcatcatagttagttgtttagtactaatatgtggaatggagtcatctcaccaaatttgagaaatagactcatgatgcaccacttcattttggatagagtgattcatcaaaccaaacacctcataatttcgtctgcttgttaccctaggtatatgtatgattagatatatgcatgagtttggcatcattctcgatctctgtcctcttcgctttagggggtgtttggttacaccccgctaaaatttagcccctgtcccatcgaatgtttgaacctccgttccgagtattaaatgcacatctacaccagcagcaccttctccagcccaggcaccatcttccccagtccaggcgccaccccttccacctgggccagtgactcgggcccgtgcaagagaattgaactacatcatgctgttaaagaacgaaggcccggaagaatagacgaccagcccaactgcggcccataatgcacgacctagggttggccgcccctaggggctgcgccccctctctatttatccaggagctgcgcctcctttatttctagagttttgttttacgttagctttagctactctcgaacacgcgcaaatctgcgctgtcttcgtgtattcagaactccaccctcgagtaatagattagattgctcgcatctttttcttgttcgttcttcgattgcgcacaggaaatgatcttcgtgatcaggccgatctcgcatcagcaaggtcggtaaccacagggagttggttcagcgattgcattggcgcctcgggcttgctcgtcgtagtcggatcgcaagggtcatcttccgccaaatcggaattatctctactcgccgaaagatcgggcacctcagctacatcaattggtatcagatttccaggttgatcggtgagtttatcgagtgttttttttcctacagtccacaaaaccacataaaaattcaggttagaccttatcccagcacccttttgagcctcgcactttctttcaataatctgcattgttgaatttgtgtgctttcgcgtcatttgttgctggttgcattgtgttcttccaccattcaaaccctagcgccgccaccatctcccctttgatcacgccacaaaccgagtcaacattgtttccttgtttttctccttcggttacgtcaaaaaaaacagaaaaaacaaaccgagtcaacgaccgtttccttgtttttctccttcggttacgaaaaaacagaaaaaaaacaaaccgagtcaacatcgtttccttgtttttctccttcggttacgtcaaaaaaaacagaacaaaaaacaacgaaggagaaaggatacagttgtttcatcccggtcgtttgaaaacataacttgaggtaccttccttaaaccgggcataacttttcgctcgggtgtccaaaaaatctgaaatttttacaggagctagttgacaccattctgaggccggccaaactcacctttggtctgtttgggttcgtcaaaattgtcaaaaaaattcaggaaaataaagaaaaaaatccgtcaaagttctcgcacgcttttcagagaacttcctgattttctgtagaccacatctgatctctgttttaggtgaaacttcgtctagctcctattttgttgcttcttgtgctgagaaaaatatcaaaaaatcatacaaaaaagaaaaacaaaatcacttgtgattcctactagtggcctcgctagtacaatatttacggtactgccattctgctagttccatccgtcctttgcacttgtggccagcaatatagtttcgtgttctgcactataattcaactttgcattattgtttgattgtgctaatcattgacttgagtgcagcctacccagaactccacatatttctacgacgagcaggcttctgtttctccaggcaatcgctcatccaatctttcaccggttccacctgttggttgcagttcaccactgtggcttggtaagaacggataagaatttgacaacagcactagtgtgagcgccttgtgagcagtacacccctgtttttgtcgttgttttttttcttcttcttttggtgttttggtgtttgcgctaactatggcaggagcacacgacacggtggatgcccagttgctggaagtaaggggacaagttgatggacttgctgatgacattaggacgatgcatgaacggcttgattcaacggtcacttcgacgaccgagcgtttcaaccagcttgaccttgctcaaacggcgactcgcaccacactcgacaccatcctggcacgccttgatgcgttgaccacaaagatggagcaggactacggcggtgacactgagtgggaagatcatccccctaatgacttattttctaagattaaatttaaaattccaccttttaatggcaaatatgatcctgctgcatatcttgattgggagttagaggttgaacaaaaattttcatgccatgatattgctgcacattctcaggttaaagctgctattagtgaatttactgattttgcattaatttggtggcgtgagtttaaaataaaacatcccactaccattccaaccacttgggatcagttgaaagctgcgatgcgacatcgatttgtgccttcgtattatgctcgtgatttgcttaataaaatgcagcgttttcagcaaggttctcaatctgttgaggactatttccaggagttacaaaaaggtatgattcgttgtggcatattagaggacaacgacgctgctatggcacgttttcgtggtggtttaaaccgcgaaatccaagatatacttgattataaggaatattatgatatgactactttatttgaatatgcttgcaaagctgaacgtgaagtgcagggacgccgctcgaagccatattctaacccttttgcaggacgaagctcgacatccacctcagcaccagttccccctgcgccatccacgtccaccactactccacgcgagaagacgaccaaaccagccagcactgccccacccacaggtcgtacacgggatattcagtgtcatcgctgtagaggatttggccatgtgattcgggactgtccaaacaagcgcactttgctcattcgtgacgatggtgagtactcttccgctagtgattctgaagaaattgaacatgcactacttgccactgaccatgcagctaaggcggaggtacatgtcaacccgggcgacgctgataggtatgaaagtcttgttgtgcagcgtgttctcagtacacaggtcgctttgcccgagaagaatcagcgacacactctgttccatacaaagggtgttgtgcaggagcggtcaattcgcatcattatcgacagcggcagttgcaacaatttggcgagtaccatgctggtcgaaaagttatcgttacccactcgtaagcatccaaacccatatcacattcaatggcttaatgatggtggtaaaataaaaatcacacgttccgtgcgcgttcctttctccatgggtgcttattctgattttgttgattgtgatgttattcccatggaagcatgctctttgttacttggtcgaccttggcaatatgatactgatagcttgcatcatggtcgttcgaatcattattctttcatttttaagggtcagaaaataattatacatccaatgacacctgaacaaattgttaaagatgatcttgcccgagctgctataactgctaaacaacttgatccatcgccctctgttccttctgaaatcaagttgaaggctcctgttttacttgctatgctacacgtgctgattttgatgatctacacggtgctcatttgccatgctatgcacttatatgctctagtgtcctcatttcacttgatgaggcaccatctttggctattccccctatggttgctaaccttttgcaggagtacactgatgtctttcccaaagacttaccaccgggtctcccaccacttcgtggcattgagcaccagatcgacctcattcccggcgcacagctttcgaaccgcgcaccgtaccgtacaaatccggatgagacgaaggagattcagcgccaggtacaggcgttgcttgacaagggatacattcgtgagtctcttagcccttgctctgttcctgtgttacttgttcccaagaaagatgggtcatggcgtatgtgtgtagactgtcgtgctattaataacatcactattcgttatcgatatcctataccacgccttgatgatatgctagatgagcttagtggtgccattattttcactaagattgatttgcgtagtggttaccaccagattagaatgaaactgggtgatgaatggaaaacggcttttaaaacgaaatttggtttatatgaatggttggttatgccgtttggattgactaatgctcccagcacttttatgcgagtgatgaatgaagttctaaggcccttcataggattgtttgtggttgtttattttgatgatattcttatttacagcaaatctaagaaagagcatttggaacatttaagtgttgtttttgatgcattgcgtgctgcccagttatttgctaacatggaaaaatgcatcttttgtacacgacgtgtctcgtttcttggttatgttgttactccacagggcattgaggtggatagcagcaagattgctgccattcgggagtggcctacaccgacgacggtcacacaaattcggagctttcttggacttgccggtttctaccgcagatttgttcgtgattttagctccattgcagcgcctctacatgagcttacaaagaaagatgtgccatttgcttggagtgattcacaggaggaagcgttcagcactttgaaagataagttaacccaagctcccctattgcaattgcctgattttaataaggtgtttgagcttgaatgcgatgctagcggtattgggctaggtgctgttttgttacaagaaggaaaaccagttgtttattttagtgaaaaattaagcggtgctagtctgaaatattctacttatgataaggagtcggattataaaactaatttgtcagccgaagattaaaagacgagacgaatctagtccagttggttgggtctatatttcatacttctatttaaaagtcaaacgcttgatgtgacccgggctaaactttagcaggagcaaccaaacacccccttaatttgctaattccgcatacacctagacgggactagcttgcatttgtttgccatatatatattatttgtttttttttctagtccgatgattgcatatactaattcttaaagaaagtacagagttgaatgcctgcgcccaatatgaagggatccctatatgaattagtaagcagagatagagggaaagcagctttctttcctttaaaaaaacgaactaattaaggatccactagataatagcaacagtccaaggctccaacaagtagaaaactgaatactgactgaatgcgaggcacatgcgtgcgtactgcgaggtgttgtcgccatatcgagcgtgtattcctcctccctttgtcttgggaactagctctccctacaaaagtacgtgatagctaggtacattccttttagggggtgtttggttaccccaaactaaactttagcccctatcacatcgaatgtttgaacctccgttccgggtattaaatatagtcggattataaaactaatttgtcagccgaagattaaaagacgagacgaatctagtccagttggttaggtctatattgcatactcctatttgaaagtcaaacgcttgatgtgacccgggctaaactttagcaggggcaaccaaacaccccctattaggtaaagatgtttcctgctgggtgtaccctcgcgtataatgttgtattgcatttccacttacggttgtgtcttgtgaacgaactgaaacctatcgtcgatgtttccagctgtacaaggcgaagagctaccctctctatgttttgtccaaatcatgtaatccttcacaaatcctcgacataccagatgagatattatttgttctctatcatcaaatacaacaacctttttgcagtccatacatggacaatatatatactttgtctttgttctctaagcatagttcgtagcgacattaataaacctatgaacctcggatatgtatgatcgatctagccttgataagttatacatctagggtgccctcgccatcatcacctgtaaaaaagtaacataaacacacaaggaacacaaattgcactagtacagagaagttctatagtggcggttgtaaaccaatttatagtggcgtttttcgtaaccgccagtgctaggggccagtagaaatcatcatttttacaggcgggtaactgaggaccgccagtgaaaatcgattttcactggcggtcggcgtaataaaaccgccagtgaaaatcgattttcactggcggtcgacgtaataaaaccgccagtgcaaatcgtttccaggaaacataaaacatattttaaaaatagttaaaaaatttatttttattaggggggcctcagcccaccccacccgcccgtctccgtcgaagtcgcaagtcgcggcatttttcgcgcaaaattcgcgcgctacgcggttgttagtattcgaaccgtcgacctcaccctcgcgcgtaccctagtttatcttgtgtctagtttgtagttgttttctccacatattacaaccatttgagtgtaaattgcttatttgagaccctaaacgaattcaaataaaaaagttgtcaactacaaagataaataacttttgaagttctacaacttttattttgacacttttttcatccgaggtagtttgcaaaatttgaattttaaatttgacatacttagattcaatttttgagaaccgaaatgagttcaaataaaaaagttgtcaactacaaagtttcataacttttagagatcaacaacttttattttggtggttttgtcatacgaggccgtttgaaaaactcgaaaaattaaggataaaaatgatttctagtggcggttttcttaaggaaccgccactagaaataacacagtcggtggataaccgaatccgcctgtaaaaatatattgtccccgcaggctttgagcctttttgtactagtgttggcaagagaaatatgagcttaaaagtttgccaaaaactacaactgcttaggcgaagggtttttgactttctcacggtctctttctatagaagcgttttcaatacccaccacagctttttcaaaagacatagcttaaccaaacataatctacttatagatcatgcatgcatgcgtgtgtttggtacggctccatgttaccaataaagtcattttgttcttaagcttcgttcatgaaaactcaatcgatatagataaagttgtttatcataatatagtttctcataataagaagaaataaataatataaccgtaatgccgttcgtttttttctctccattcaattctttcacagggcaagggcatgggcagcaccgtgcatccatgttactcaagtactacaagtcgccagtttgcttactttttaggtccctttttaatttcctattcgaccgatctgtgtgataaacaatttaccggttaattttaccactttggccctcaaacaaactggctaataaattgactaattgttagccgggggctagcaaactgtttgcccattagtcaattgaccttgttaatatataggtgctaatagaacgtataaagagaaaagacatatatattagcaaagactccaaacataccctggctaattgttgctagcgaactatttaccgggtaattgttagccactggcaaataattagccgcgaggatcaaacatggtcttagtcgtcgttattattcctttaattaattttactagaggcacacacacaaatgtgagggtcatatcctaatttaattaccattaacttcttatccatcttatacaacctaccaccctgccttaggttatcaaccgtagctttgcacctgtttaaattacatatgagtggaacatcctcagtccacatcatgtcagaaacccttatataaaaaagtttggaaatagtagataacacaaccatgaagggacgcctaaacgcaagatcatcatcaagctattttgctgcaatcttttttaatgtgaataataagtgtcttgggcttacaaaacccatagaacctctttgatagcgccttaatttctatgatcagcttcttccttcttatcaacatgtggaggaccaaccccaacattgggtaaaccaaagacacaataaaaaagaggaatggtccatttgtacacaaggttgacatttctctttgatatcctaatttaaagtcattctaataagattttgtcgcgcgacactgtcgctcgttctaaagtgtacataaatttgacactagattgaattgtttatgttgaggtgtttttggtgtcccttggggtctgtattgagttttgagagtcaagccatgtgtgttctaggttgagaattttttgtgcctcacattcgtcggatccttcggtcacaaataaatgatgtcactaaataccttgatctctagctttactttgatttgagaaattacttagcagtgttcttttctctaactattaaagcatgtccatcgtggattcttataaaaaagagtcatatatctatatgttattatcatgcataaatatataactgatgagtgatgcatggcaactttgtcggcaattaatgtagctgttaacagcattaaggtggtgggtctccgggaatacttttgagttcggggtatactagccaaaagatacaaaattaaccggtaacatacacataaatactaaggacaagcaccgtgttaacgctaacgacaaacacaaatggaggatcaaggctaggattccatatgtcgtactataactgataaatggcagcgagctgtcgtccaacaactctggtcaggctggaacgttccggtgaccttgttcggttagttctcaatccatatgaattgagtgagattagatggatttaaatcgaaagcaagttaaatctcttcttaattttttccaatctcattcaatccatgtgtaatgtgaataatcgaacaaagccatagtaaaattcattatgtattttcaacatatatactaattaaagttcatccttagggacatatatgatctcatgcatgttcccacatctctagctagctaggtttatatgtcctacatgcacataattaagatgtagtccgtaatttttaacatacgtgttagaaagctagtgcacgagtatatatggcatctggtccttcacctcctcggctcctccatgcatgtccttgtatatagcttgcaaaagagaggagtttagtgttgctatctgattaatccatgtaatcaaatatgacactttgtgcccaccatgcacatgtgccagcaggctaaaggtagttatagttatatatatggagtatattgcagctctagtcggcacacgcagcttcagtgtacctagtacgatgctataaatagcaacaaaatgagctcacacacatcagcccagcccagccacaccagagttcacccaccctcattccgccgccggccgctaggtatcaccggcgccattgtaggccggccctgcttcctctagctaggtagctaagctttgtaccatggtcttctgtaaggctagcaaagcagccttcatcctggttctcgtaatcctcgtctcctctaaccatatcatgatgtactctcgaggcaaacaacccctccgggtgatgcataggaggtttaaccctgttgtcacatcattccgctggggacaccatggggacagcaatgacgacccgaggcggcacagtctcgccggacgacggcaccgggagcggcggcgtcctcggagaggacacccgagcgacggatcctggacacagccctggtgcgggcaatgcagccaccagacctcgagggggggcccgtctnnnnnnnnnnnnnnnnnnnnnnnnnnnnnnnnnnnnnnnnnnnnnnnnnnctggcatcagctgttaaattgtataaaacacaaacagactcagaaaatcatgaaacctgtccacgtgtcatgatatcatagtagaggttgtgataaaaatttgaaaaagtttcgaaaaagctgtaacgcactatgtgtacaaacctaagagatccacattgaaactctatgatttcatgtgtagttctctcaggtttctacacataatgtctcacaaatttctccaaacattctaatttttttatcacagactctacatatgatatcatgacacgtggacaagtttcatgattttctaagtttgtttgtgttttataaaattttgaaacagctgtatggcaagttcacgaccatgttgagtgagcatggtgctcgaagtttccggtccgctcctgaaatcggtcgtaacttgtgctaactagcatggatatcatttttgcatgcacgatattccaagtttcgagtgacctgcagttcaaatgtgattttttcgaagaaatttaaataaacgaactaaatctactagctatagaaaacaattttctaattgtctcgaaatggtacatgtaggtctatatagtgtaggaacataccacaaaaattttggttggaaaaattaaaaaaataaaaatgtactttgccgagtgtcaagaaataacactcggcaaagaattgtaaaagtttatttgccgagtgccgcccagtggacactcggcaaaggcttctttgccgagtgtcagcgatctggcactcggcaaagaatattttaaaatttttaaaaaatctttgtcgagtgccagatcgcgggcactcggcaaagtcaggaaataaactaccggtcgttcttctttctcctttctcttttctcacgctctcttctttctcttttttccccgccgccgcgccgtctcccgccgccgcgccgtctgcccctccccatgccggcacgccgcgccccccccccactcaggcgcccgcccgcctgctcgccgcggcggccactcgccgcgccgggccccctccccacggtcgtgcccgccacgcccgccgcacccgcctcgccgcaccgtcgcgagctgtgtcctcgccgcaccgtcgcgagcaccgtcgttagcatttttgttaggtatgttagttttgttgctagttgtttgttagttttgttagcatttttgttaggtgtgaatatcgtgaatatgaatgtgataaatgcgaatttgatcggatgtgatgaatgtgagttgaatatgcaggttttagtatcctccccgtgcaggggaggtgctgtcaaaatttatacttagttatttagtagttagtgggtagtattaggtggttagtatttagtcggttgtggttatacttatagttatctatctagttattagtgggttgtggttaagcaataaccatccatagtggacattgaatatttaattcgtgtttcaaatacttgtgttaacatacttgtgattcttttttacagagaagatacttgtcttcctagccgctgcgggtctgcttgcaccgcgtcgcgtcgccactgcaccgacccgccacagccccactagcctgactccaccgccaccctaggtataacctctatttccgcatcatggtcgtagatcacgtaacccagttaggcgtctcccattcgaaagtgatacggtgtagatatgcagatctttgcatatctacaaatgtatcagtttcgaattgtccacgttttttggacagcccgcgatttgagatagacttaaccgaagcgatcggaatggaagtagatattgaaatggttgttgatgaggaggatgatgaggtgcaaaatgagaatgacttagaaatgcttgaaggcaatgccaatgacgaaattgcgccttcagatggtgttgactatgaaatggttgatagtgatgatgacacttatgatccggctaacccagacacatatgaagattatttttaatcgatgtaatgctatatttcatttattttgcatatgtttctaaatacatattacatgtgcttaattgcttactcttaattgcaggttgttggacaaagatggtgggcggtgggacgaggacgaggagggggagggggaggaggagcacccgtaggacggaggaggaggcgcagcaggacgacgccgtacaacagcaggtggagcagcaagtcgctgtcgatgcggcgcagcaggacgacgacgatgcggcgcagtaggacggcgacgatgcggcgcagcaggacgacgacgacgacgccgctcagcaggacgtctcaggttctggctcctcaggttcgaggagcatctacctgcgaggtcccgcgagtctccctcagcgacccatacttcgtgacagacgtccgctgatacgacccgatggagagaggtaggtaactttagatgttgttgctgctttttcatattatatgttcaaattaacaatagaaactaatactttatcttaatcacttggaaaggtcttggaaggttttggagagtgcagggggtcacggccgcaaccccaatggcatcctcgaccttctatgcagggaacacttccctggacttgtcgaatacgccggagtgacgagcccagcctacacctttgaccactatgtcgtcgcccccgatgcagtagatcgggacggcagagaattcaacaacaaggtggagcgggtgaagcaagagttgtgggtaagtcttcctcgcactatattgtttaataagtcgcatttgttgcatattcttgaaataatgtacggatacatcgtctttgtatgtaggatttcttcagatgcgaggctggatacgaggccagggcggatgtggtggctaccacgagctgtaagaagctcatcgtggacatgcactacgaggcacgcatccaggccatcgtcacttaccacggctccgtccttggggagaaggtgagcaagaaggacgcccgaaccatgtcgttgactccggaccagtacttgcaggtaaatacaaaactttattattggtactaaatatgcttaattttatcttctgatatgtcgtgtacttgtatttttttagatgattcctcattggtgcgccgcgcatcctgagtgttgtgagcagatggtgcagaggtggtgctcggctgagtgggacgaggcacacaacgctagccgggaacggcgtttgatgatgcaaggtccctcccaccatcaaggcagccgcagcctgggcaaatacgcggaagcatgggtacgcgctcttttttatttaggtatataactttcgattagacatgatttctaaccatctcgttggttatctcgcagtcggcggcacatggtggcgcgccttgatccacgttctcggcatatgctatggcccacaaggggaaggcgacgtccgacgtcacctacaacccagatgacgggcctgaggcgtacaccaaccccgccgtccacagccgcctcagtgagtacaccgccatggccaaggaggtccacgggccagattacgatccgaggactgaggacatcgacggagatgtcctcatgagggtcggaggaggcaagaggcatgggcggtactgggattgccgacggggcaatcgactcgtcctccactcccactctatctcaggtgcgagctaggagcacgagcgcgagcccagccatacgacctcggcaggacagctcacagcatcgtatccagcaactccaggttattccttatctattcatcgttcattgattattatatatcttctctttgcattatcgtaacattagggcgaaatattacagactcagctagatgatgagaggaggcaacgtgaggagctggagaagaggatggcggagatgttcgtgtacatgcagagccttggcgctgcacagggtcatgctccaccacctccgttgttccctgcagctgaccctgctgagttcactactcctgtgagtatcaaaattttagtactgcatgatatatattcatatgttctcacacatgcaatctcttctctgtgcagggtcaatcggcggcgtcgaacaaccctcatgcttcgtccagcccttcgccgaaccagtccagatgcccacctcgttgatgacctgttttgtgatgatccagacttatatttgtgagtgttggtgatgttagttatacttggtcttgtgagatacttattgagacttatgtgctctaaaacctgatttatgtggtgatatttgtgatatatatggtgttgatgataaatgtgttgattctgtgatgcgaatgatatataatgtgatgtgaatgatatatatcttttgtttgtttggatggaacagcaaaaacaaataaaaaagggacttcctggtcactttgtcgagtgtaacactcggcaaagggtatctttgccgagtgttatgaccttggcactcggcaaagaaggaaacctgggaaccggtaaagccttctttgccgagtgttgtggtcaagacactcggcaaagaagccacctttgccgagtgccgcccagcgcactcggcaaagggactggcaaaggggcccactggaggactctttgccgagagccagtccactagacactcggcaaagaagcctcctttgccgagtgcctacgaaagctctcggcacagggactggcggtggggcccactggagccgtctttgctgagcgccatgatagcaggcactcggcaaaattggcctctttgccgagtgccgaagaagacactcgacaaaggatctgtcaccgtcacttggcgctgtgacgacgacttttctttgccgagtaccaaatggcactcggcaaagtctttgccgagtgcccgacaaaaagtactcggcaaagaggtcgttgccgatgtacagttcgccgagcgttctttgccgagtgttacactcggcaaagtgtttgccgagtgttttatatgttttgccgagtgcctaaggcactcggcaaaggagctgtgtccggtagtgttccttgtttttcttctctccccctcttttttcttgagcgacaaaaatccagtgtgtgttttcttctgttcgcacaacgaatttattgcctcatatattttactgatctctacaatggtttatccattccttgtgtgtctgtcaatcagaatagcctaccgtacgtgtctccttggaccggccagtgacgatctctttatatatacaagtactagtatagtgcccatgcgttgcgacggtatacaaatataatgtccaaacttggcgaagacaatgcccatgtcatttgggccagcccaagtccatgcgtcctaccagatgtgatgctggagatactgtgtttccgattcactgctagaagcaatcagcatatgcaacaatcttaagagcacttaagagctttctgtgttgtgacaaaccacctctcatgggacgacaaacatataccaaagttacaaggctagagtttttgatgtttgtcgttcatatcttttaattcccgtggaaacccacatacacatacctagtaaacatataagagccattgtaatgttgttcagtttatgacctatgcaataaacataaaagagcaaccacaccgttgttcaaaagccaaacagtacaccgtgaaaaccgtccattgaacaatccaaccacttggtccttcgtaacaggataacatgaactcaaatgcaaaatcaaattttaacggagtctagtatagcttcctatattagcaaaatcattcaaatttcaggcattccgcactgcaaatacatgtaaaacaagaaaattgggagtctatttttgggaattgtcagttgagaagtggatttcttcgagcgatttacagtatctctgtttgtacataagcaactcttctgttcacggatacaatctctccagttacaaaaagatcatcagaacaaaacgtcttctgctacatcatctaagagctattgtcaaaagtgttggtaggaggaaaaaaggacctaatcctttggcccatcaagaacatataagaagacaacccagagcctgcatagtactctagtagcttctgaaaattttactgctactattactttatcatcaaggttgctttagcagtacaatgccaggacaagtacaaagaaatgaaacatgaaacaaagtagaaaagaagccaaacgtgatggtgagaacagaggatcctccagctgaacacaaaccagatcaaaattttcgagaggattgcagcaccctaagaccccatgagcccttggatcgtgtattgaagagacttcgcctagtattccttaaaaagtaaagcttgtagagtcttcataacattataatttggatccaacttatgttgctagccctgtaataaaaatgaaaagaaatgaagaatcacaaacggaaaaaggaatgcctgcaaaacatattcttgcaattaaagagacaatggtgtgatacacaaatagacaattacataaagcagtttatatagccacagtggaatcccaactgtttacaaatggacgcatcatctttagctggaaattagacaaacaaaagaactatatgaggagcaacatgtaaaagcaagcctaattctgatatacacacatacacaaacatacatacatatacatatacatataaggatcataaatggcacaagggtaatggaaatagtagggccatgtctcagttgacattcgtgaagcttcatgatgcccttttgacaagttcttaaatagaagtttagcttgctgcttatagaaatcagcatccttctaatctcgcccatcatccaacccttctgctagtggacatccattagtgacacgagctatcattgttagcttcaccatggtgtcaagaaggccagaaccactataaagtactccctccgtccaaaattaaaatttgttttacctttttagtgtatgtgtcctatatatgtgtcaagattcgttatcatacatatgaatataaacataaaaatctagagctaaaacaactactattttgaaacagagggagtattgtacaaaaacctacatagctgtaatgaaaaacataaaatgggtgctcaaaaaataaaaaacaatccacttcaatcgtataaccatgagcctatcacaatataaaccaagacatcaaattaggaatagagtgtcatataaacccacctttaacttcattcgaagggaatgaattggatggctagtgttgtctagtgttctcgcagtgcatcttttcattgatctctctttatcaagacgaatgcaacaactactctaacaagaaaagagtctgatacaagagggtgcagggtgatgggttgataaaaatattattgatacattcacaagcttttgcaacgcaccaatttggcacagtacaaatgttcccatgaaagagtaaacacaaagacactcaaaaaatcatgcctaaatctgaatagtaaaagcacacatgtacacacattactaatcatgaacacccttttattctttggatcaattatgatattgtatactgcctctg

SEQ ID NO: 7 - DNA, 201 bp, Zea mays
gcaacctacatcctaacacagtattttacacgagcatatctacgagacaaagcctaagagaaaaggaagccgcatgttatttcccgtatgcacgtgtgattcgatgtttatttgctgttgtgcgatccacatccggaatggatggaaaggacgttgtgatgtttgatgaagtggatacaataaggccagaagcatacaaat

SEQ ID NO: 8 - DNA, 201 bp, Zea mays
atgcctaaatctgaatagtaaaagcacacatgtacacacattactaatcatgaacacccttttattctttggatcaattatgatattgtatactgcctctggtggtaatcctcccttaaatctcaaattgaggttgcaaaaggaaccttctagtacagtcagctgtaaacatttgatcatgtaagaataagttactacatt

SEQ ID NO: 9 - DNA, 261 bp, Zea mays
ggggtgctggccaagctgggtgagctgacggaggaggaggcgacgacgctgctgcgcgtggacgccgagatacgggcattgtggcagaagctggcctacctgcaggcgctcgtacgcggggccggccgccagcgccgcgaccgcgcaagcgagctgctcctgctctggctacgcgagaccagagaggttgctttcgcgggtggttctgccatacatagcggcgatggctcttcctcccaggactaccatatctacacataa

SEQ ID NO: 10 - DNA, 429 bp, Zea mays
atgcattcgttgctgtacagggcaccatgggtcttattctacactgattgcccgcagaaagctgaattctctaacatatgggatactaacaaaactgcagctcccatgattcatcgggagatagtcaggtttggttactgtgagtcttcatcttcaaaatcctcaagtgacaactctgaagagcgagatgaatgcggtatagttgatgcactggtgacaacaataacacagattcggaagatggacttggaggcaaggagcctacagcctagcattaaggctggtttgcttgcaaagctgagggagtataaatctgacctcaacaacgtcaagagtgagctcaagaggatatttgcgcccaatgccaggcaggctacccgggaggagctcctagagtttggaatggctgatactctcgctgtgagctaa

SEQ ID NO: 11 - DNA, 600 bp, Zea mays
atggcacactttgatgaactagaggataaaacaacagattatgttgatttatcggttcaagaatttgctcttaagcaacctcaatgtggcatggcttataattactatggaaatttaaggctttatgtagtagccaataaagctgaattggcctcttcaatatttgaaatcgataaggcaggtgggccatcggcgaagcgccatggtcgtcgtcggggggcaggaaccaggcggtgtacgcgcgccgcgcgcccggctcttcatcgcctccacccgctccagcgtctccaccacctccttcatcgagggccgactgcgaggctcgccggccaggcagccgagcagaggaagaagcagaagctctccgagatccaatccggcgttgaggaagctgaatcgctgattcagaaaatggacctggaggcaaggagcctacagcctagcattaaggctagtttgcttgcaaagctgagggagtataaatctgacctcaacaacgtcaagagtgagctcaagaggatatctgcgcccaatgccaggcaggctacccgggaggagctcctggagtctggaatggctgatactctcgcagtgagctaa

SEQ ID NO: 12 - DNA, 1020 bp, Zea mays
atgactcggacagcgcacgcgcgaaaataccagcacgccgcaggggcatttccgtcagcggccgcccataagagtcctgtccacagccctgccctcccgcaggccgcagccgcccttcccgtccttctttctcgtgaacagagcagggcaggctcaccagccagcacgcgcggccacgccacacccgcggagacgcggcacgcctccactcctcggccctcccccgactccgaggcgagcacgccgcacgctccgcctcgcagtcgcggccccgtgctctcttccttcttctccgtccaccgtcttctccttcttcgctcggagggttcgatctgttgtgccggcgatctccacccacctgacgctgggcatcttaccgccgattcggtcgcgttggctccaattttggaattccctccaccgtacccctcacgcaagagacctccgttagatcccgtgacggagctccaaggtagcaacgagactaacgtgactgatgttggagcaggagaagaaaccgaggagggtatgcacgagaacagggacgagatcaacgcgctcctggacaccgacaggcagtctggtggcgcagccttgagcgtggagtcggtggccagcgctggcgctgcgccgccggcagccaagaagagaaggctcagctcctgcatcgacaagtccgtcgtcgacacggccagttcagcaaggcctcctgagcgttccatggagcaggagcagagggttgaacttgcgaacgaccgcgacgcgcagtcgtgctgcgtcggggaggtggaaagcgggcgcaggtttgctctgggggaggcggaagcggaagcggcagagggcgacagccccgacgagcagaggcggaggagggagaggatccaggagactgttgccgcgctcaggaacatggtccccgggggcatcgcgaaagacgccgcggctgttctggacgaagcgatctgctacttgcagtacctgaagctgaaagtgaagacgctgggagctgtctccctctag

SEQ ID NO: 13 - DNA, 273 bp, Zea mays
atgaaggggtgcctcggcaagcgcccagtgttcaacgtcgagcgcctctcgacaagcgtcgtgtcgccatggatgggctcgttggcacttggcagcatggagtccgcgatgcaggagttgcaggttgggggccgggactcatctgctccgtgtgggttgacgcatgctgcagcatctgtacctgacgaggccatgtccaagattagcaaacctgggcagacgctcggcttgctgcgagcaagcagactgggcaccccttcatgctggcagtag

SEQ ID NO: 14 - DNA, 1041 bp, Zea mays
atggggttccgctgtggccgtgcctcctcttcgctgctgtgtgaagaggacgtggccggcatgtttggatgcaatgggcacgacgacgaagaggtggggcttctggtgttggggatggacacgacctttgctgcgctgccatcacagagcgacgaggtcgtagcatccctgatggagaaggagaaggagcagctgcatagcgttgcgacgggggattacctccagaggctgagcagtggaggactggagtcatcttgtaggattgccgccattgattggatcaaaaaggcccaggcttatcacgactttggaccgttgtctgcttatcttgctgttaactatcttgatagggtcctctccacaaatcaagtcccagctgatgctgaccaccagccctggatgccacagctgctgtccgttgcttgcctaaccattgcagccaagatagaggagactgtggttcctcgccgtctggacatccatcagaatcaggttcctagcgagaagtacagtttcgatttagatgctattcagaggatggagatttacgttctagactctctgaattggaggatgcaagctgtgacgccattctcttatatcaactatttcgtggacaagttcactggcgagaagccgctaagttgcggattcatttctcggtgcaccgatatcatacttggcagtgttgaagcaacgaagctcctacagttcaggccttctgagatggcagcagcagtggttctgtcagcagctgctgagtctcaagtcattgccttcagcggcgttcttttagcttctaatatccctgtcaataaggaaaatgtaaggagatgccatgaagcattgcaagaagtgggattagtgaagaagaaaacagactacagtgcgagtccatctcgcgtgctggatgcctcatgcttcagcttcaagactgaggataaccagacagccggttcatcccaatcccaagcaaacaacaatggcaactacaaccaggcttactctccagctagcaagaggacaaggctagacatctag

SEQ ID NO: 15 - DNA, 231 bp, Zea mays
atggtggcgctgtgcgcgggtcggccacatccatggcttctcccgcgcctccggctgcactgggaggctgtacaagacatcatacgccgtgggggcagcgacggcgttcttgacgatcttgccttcactcccgcagcgaggacgggagcgaagacctcttcgtgcgcactggtacagccactgcctaccggtgcagaggtgatcaccgccccagcggggctgatgtggtag

SEQ ID NO: 16 - DNA, 609 bp, Zea mays
atgttctccttgttctatggcctgtggaagtatgtgttcgccaaggacgagttccgtgttctgattcttggtgttgacagagctggcaagacgactttgctggagaagttgaaatcgatatatctcaagggggaaggacttccgcctgaccgtgtcgttccaacagttgggctcaacattggccgcatcgaagacgcaaaggcaaaacttgttttctgggatctaggtggtcaggttagcctacgaacaatctgggagaaatactatgaagaggcccatgccataatgtacgttattgacgctgccacagcatcgtcatttgaagattccaaatctgctttggagaaggttattcgccatgaacatctgagaggagcaccactcttgatagttgcaaacaaacaggatttacctggagccattgatgaggaagaattggctaaatttctgcataaagaactggatgagaggacatatacatttcaggctgtatctgcatatgatgggagggggatcaaatctggcatagactggctggtggaacaaatggaaaaaagcaaacgtaccgagacactgcaggctcgtgctggcgtagctggacaaatttag

SEQ ID NO: 17 - DNA, 1191 bp, Zea mays
atggacttctccaccggcgggagcgtgagcgggggcggcggaggcgccagcgacggccccgcgcaggcggagcgctggctggagatcgccgagaagctcctcgcggcgcgcgacctcgtcggctgcaagcgcttcgcggagcggtcgatggaggcgaacccgctcctcgctggcgttgacgagctcctcgccgtcgccgacgtcctcctcgcttcccagttcatgggcccctcgggccagccggacccgctcgccatcctccagctgccgcccggagtcagccccgaccaggccgccgtgtcccgcgccttccgccgcctcgcgctcctcctcggccccagcaacccgcacccgggagccgagatggcgctccgcctcgtcaacgacgcctacgccttcctctcggatccctctcgccgccccccgccgcccgccgatcccgccactggtaccccttactcctcccagtatcccgccgcggccgctcccgcctcggacaccccggagttctggacggcgtgccccttctgctgctacgtgcaccagtacccgcgcagcctgatcgggcgcgccctcaagtgccccaacgcgggctgccgccgcggattcgtggcttctgagctcccgaccccacccaccgttgtgccgggcactgaaatgtaccactgcgcctgggggttcttccccctcggatttcccaacgcggccgacctgggtgccaactggaagccattctacaagatgtttccttggaacacggctcccagtggccaaggtggtggtggtaggagtcacggaaaccatggtggtaggcagccacagaatgacagtgctcgtggtggctcttctagaggtaggatcaagaagacgacggcccgcaagaaggtcggggtagggctcaggagacgttctcttggtgtggagagtggcattgattcttcgatgctcgggcaggaaggctgggctggggatgagaacgctggagatggaagggccgaggaggtgaggagaattaacataaatgaggcagcacatgctacagatggcactggtagggttaatgttagcggtgctggcggagttgaagatatcagcaactttcatatcgatgttgatgcatctgaggatatattggggaatttgcacaacatgcacttcttgagggtggacaatcttggacggatgatttaa

SEQ ID NO: 18 - DNA, 1170 bp, Zea mays
atggttgtcttgtccctctcgcagggcgcgtccggggtcgggctcggcaacttcctggagatggggccgctggacgtggacctgaagccgcgcaactcgacgtggctccacaaggccgacctcatctttgtggacaacccggtcggcacagggtacagctacgtggaggacgacagcctgttcgtgaccagcgactggcagcaggccgcggacatgacgacggtggtcagggcgctggcgaaggaggtgcccaccctggcgagcagcccgctgttcctggtcgccgagtcctacggcggcaagtacgccgccacgctcggcgcgtccatcgccagggccgtccgcgctggcgagctcaacgtcacgctcggaggtgtggcggttggagatagctggatctcgccggaggatttcacgctttcctacacaccgctgcttctgagcgtgtcgaggctggacgacaacgccggcgacgaagcaaacaagaaggcggagacggtgaaggagcaaatcgtggcggggcagtgggccgcctcgcagaagtcatggagcagcctgctagatttcatcgacacaaagagcggcaacgtcgacgtttacaatttcatgctcgactccggcatggacccggtggcactgctgcccgtgggttcttcatcactgatgagcagcttgcaggcgatgaagaagtactcgacgtacggccaggactcccagcctggctccaacaccattgacggcatcatgaatggggtcatcaagcaaaagctcaagataatccccaagaacttcacgtgggggcagcaatccgactcggtctacaacgcgctggtcaacgatttcatgaaaccgaggatcgatgagattgatgagctgctgtcttatggcattaatgtgacggtgtacaatggccagctcgacgtaatctgctcgaccaacggagcagaagcatgggttcagaagctcaaatgggatggtctgaggaccttcctgagcctgccaaggcagcccctctactgtggcgccagcaagggcaccaaggcctttgtcaggtcccacaagaacctgcatttctactggattcttggagcagggcactatgtgcctgcagaccagccctgcatcgcgctaagcatgatcagcagcataacccagtcgccagcaagctag

SEQ ID NO: 19 - DNA, 1608 bp, Zea mays
atgggcatagaaaacagggtcggcgccaattaccatggcgccgatctcatgtcacatagacgccacatcagcgtgagagatcagcgaaacaacgcttcacctattttaaaacgggtctcggcgctcgccctcttggccacaggcccacagcgcgcctcacagcgacacccaccacgcccccggtcgtgcatcatcatcatcactcgcgtcttcgagttcgaggacatggacaggccgcgttgctactccccgcttgccctgcacctcctcctctgcctcgtctcgctccgcgcctgttccgccgcgtccatcactgccggcacccccgacgagtcggagctgtgggggtacgtcgaggtccggccaaaggcgcacctgttctggtggtactacaagagcccgcagaggacgtcgacgccgtccaagccatggcccacggtcctctggctgcagggcggcccgggcgcgtccggggtcgggctcggcaacttcctggagatggggccgctggacgtggacctgaagccgcgcaactcgacgtggctccacaaggccgacctcatctttgtggacaacccggtcggcacagggtacagctacgtggaggacgacagcctgttcgtgaccagcgactggcagcaggccgcggacatgacgacggtggtcagggcgctggcgaaggaggtgcccaccctggcgagcagcccgctgttcctggtcgccgagtcctacggcggcaagtacgccgccacgctcggcgcgtccatcgccagggccgtccgcgctggcgagctcaacgtcacgctcggaggtgtggcggttggagatagctggatctcgccggaggatttcacgctttcctacacaccgctgcttctgagcgtgtcgaggctggacgacaacgccggcgacgaagcaaacaagaaggcggagacggtgaaggagcaaatcgtggcggggcagtgggccgcctcgcagaagtcatggagcagcctgctagatttcatcgacacaaagagcggcaacgtcgacgtttacaatttcatgctcgactccggcatggacccggtggcactgctgcccgtgggttcttcatcactgatgagcagcttgcaggcgatgaagaagtactcgacgtacggccaggactcccagcctggctccaacaccattgacggcatcatgaatggggtcatcaagcaaaagctcaagataatccccaagaacttcacgtgggggcagcaatccgactcggtctacaacgcgctggtcaacgatttcatgaaaccgaggatcgatgagattgatgagctgctgtcttatggcattaatgtgacggtgtacaatggccagctcgacgtaatctgctcgaccaacggagcagaagcatgggttcagaagctcaaatgggatggtctgaggaccttcctgagcctgccaaggcagcccctctactgtggcgccagcaagggcaccaaggcctttgtcaggtcccacaagaacctgcatttctactggattcttggagcagggcactatgtgcctgcagaccagccctgcatcgcgctaagcatgatcagcagcataacccagtcgccagcaagctag

SEQ ID NO: 20 - DNA, 1200 bp, Zea mays
atggcgagctactcgtcgcggcgtccatgcaatacctgtagcacgaaggcgatggccgggagcgtggtcggcgagcccgtcgtgctggggcagagggtgacggtgctgacggtggacggcggcggcgtccggggtctcatcccgggaaccatcctcgccttcctggaggccaggctgcaggagctggacggaccggaggcgaggctggcggactacttcgactacatcgccggaaccagcaccggcggtctcatcaccgccatgctcaccgcgcccggcaaggacaagcggcctctctacgctgccaaggacatcaactacttttacatggagaactgcccgcgcatcttccctcagaagagcaggcttgcggccgccatgtccgcgctgaggaagccaaagtacaacggcaagtgcatgcgcagcctgattaggagcatcctcggcgagacgagggtaagcgagacgctgaccaacgtcatcatccctgccttcgacatcaggctgctgcagcctatcatcttctctacctacgacgccaagagcacgcctctgaagaacgcgctgctctcggacgtgtgcattggcacgtccgccgcgccgacctacctcccggcgcactacttccagactgaagacgccaacggcaaggagcgcgaatacaacctcatcgacggcggtgtggcggccaacaacccgacgatggttgcgatgacgcagatcaccaaaaagatgcttgccagcaaggacaaggccgaggagctgtacccagtgaacccgtcgaactgccgcaggttcctggtgctgtccatcgggacggggtcgacgtccgagcagggcctctacacggcgcggcagtgctcccggtggggcatctgccggtggctccgcaacaacggcatggcccccatcatcgacatcttcatggcggccagctcggacctggtggacatccacgtcgccgcgatgttccagtcgctccacagcgacggcgactacctacgcatccaggacaactcgctccgtggcgccgcggcaaccgtggacgcggcgacgccggagaacatgcggacgctcgtcgggatcggggagcggatgctggcacagcgggtgtccagggtcaacgtggagacagggagcgaggtacgaaccggtgaccggagaaggaagcaatgccgatgccctcggtgggctcgctag

SEQ ID NO: 21 - DNA, 1119 bp, Zea mays
atggcgagctactcgtcgcggcgtccatgcaatacctgtagcacgaaggcgatggccgggagcgtggtcggcgagcccgtcgtgctggggcagagggtgacggtgctgacggtggacggcggcggcgtccggggtctcatcccgggaaccatcctcgccttcctggaggccaggctgcaggagctggacggaccggaggcgaggctggcggactacttcgactacatcgccggaaccagcaccggcggtctcatcaccgccatgctcaccgcgcccggcaaggacaagcggcctctctacgctgccaaggacatcaactacttttacatggagaactgcccgcgcatcttccctcagaagagcaggcttgcggccgccatgtccgcgctgaggaagccaaagtacaacggcaagtgcatgcgcagcctgattaggagcatcctcggcgagacgagggccaagagcacgcctctgaagaacgcgctgctctcggacgtgtgcattggcacgtccgccgcgccgacctacctcccggcgcactacttccagactgaagacgccaacggcaaggagcgcgaatacaacctcatcgacggcggtgtggcggccaacaacccgacgatggttgcgatgacgcagatcaccaaaaagatgcttgccagcaaggacaaggccgaggagctgtacccagtgaacccgtcgaactgccgcaggttcctggtgctgtccatcgggacggggtcgacgtccgagcagggcctctacacggcgcggcagtgctcccggtggggcatctgccggtggctccgcaacaacggcatggcccccatcatcgacatcttcatggcggccagctcggacctggtggacatccacgtcgccgcgatgttccagtcgctccacagcgacggcgactacctacgcatccaggacaactcgctccgtggcgccgcggcaaccgtggacgcggcgacgccggagaacatgcggacgctcgtcgggatcggggagcggatgctggcacagcgggtgtccagggtcaacgtggagacagggagcgaggtacgaaccggtgaccggagaaggaagcaatgccgatgccctcggtgggctcgctag

SEQ ID NO: 22 - DNA, 264 bp, Zea mays
atgcacgccgcggatttcgccttcctgaagcaccctaagatgtttgcgctgccgccccaaccccacttaccaccccaccgggcacgccatgacagggagccaccacagccggtggtggctgatgcagttccagtgcgcgctcatggctgcaccgcccatgtcgatccccatcaagaagttgtcctggaagaagagcacccgcatccgctggcctccaccgacgccaccacctcgcctgtgaaccagttctcgttgaggtcctag

SEQ ID NO: 23 - DNA, 246 bp, Zea mays
atgcaggcacaacaaagccctcagacaaacccaagcaactattctttatcaggtcaagtttctggtcagcagactgctcccagtggttctgtgacaggagatgaacagaagggatatccaggggcgcacaccatccctatgagacaagctattgccagcactcgaccacctcaatttcggccttccttgtctggccaaatgcggagtaatacgggttatccaccttcacaaaccaatttgcattag

SEQ ID NO: 24 - DNA, 726 bp, Zea mays
atgggaaacatgtcagatgggaaaggggtccatatgttacaaactcgtccacccaataactccataccagtacaaacaatgcagcatcacgtgcagcgaccacaaacatcttcaccagtgtttggggcaaatagtattcatgcacgtccatttccgcggccagttggagatccagctgcaccatttagaccacaaatggcagattccaatccaagagcacacttgattcagggagctgtgaccacagtatctgggagtgtgccaacacgatccatagtgtctggaaatgcgccagtgtctttgaagcctgaactttttgaaggattgaggtttgacttcacaaaagggttgaatcaaaagttttttcttagccacagtgtttttatgggctccttagaagttccagcccaggggcctgaaactattaaagttccaactgctcattatgaatttggtgccaattttttagatccaaagttaatgctcattggaagggtgataacagatggaaggcttaatgctcgcgtgaaatgtgatttgacagacaatctcacgctgaaagtaaatgcacagttccttgaatcaacacttcacttatttgtacaaggaagtgactatcgagcacaattccaaatagggaacaatgcattctatggtgcaaattatattcagaaagatgggggaaatgactcatttggtagtttaatgccatgtaaaattcagtag

SEQ ID NO: 25 - DNA, 702 bp, Zea mays
atgacctcgaaggggcacgctgcgtcactcctgtgtcctctccggagccaacctgaacgccgacgtcgcccgtcccatctccctctctccggaaggacacctcggtggccaacacgagctgcccttctccagctctgccccctagtacgcgccgatgtcgagttcagccctgaggatgccgacatgtcaaatcgagaattcttgtaccatatactggaggaagtcataaaagttggggcaaccactcttaatatcccagacaccgtcgaatacactcttccttatgaatttgggaagttaatttctgacataaaggaaaacactcttagaattgaaaatgccatcatttccactcattgccagaatggccttggccttgcaactgccaacacattagcgggtgctcatgcaggagcgcgactgttagaggtgactattaatggtattggtgaaagagctggaaatgcttcattggaagaggttgtcatggcaattaaatgtcgtcaggagctcttagatggtctatatacgggaataaattcccaacatattactttgacaagcaaaatggtacaagagcacaatggacttcatgtacaaccacatgaagctattgttggtgccaatgcctttgcccatgaaagtggaattcatcagggtggaatgcttaaatataaaggaacatatgaaataatatcctga

SEQ ID NO: 26 - DNA, 204 bp, Zea mays
atgctgcgcattagaaagggtcccttgaagggctacctctgtcgagtagttaggatatttcggaatgatgtgactgttaagctagactctctactaaaaattgttacagtacaagctgatcttctttcagtcccagctaataggggggataacttgtctggtgctccaactagggcaacaataacatatttgttccaaatttga

SEQ ID NO: 27 - DNA, 372 bp, Zea mays
atggtttccctttgtaatgtgtttcagcttgacaaacttatttctgaaggtactttacaccatgatgttatacgttttcattactatgttcagtaccatctatatatacaaggtggtgcagtttcactaaaagaagctacagttcctaccccacggttgatcagctcccaagaacttgagttcttcaggcctcacattgaaataaagcgcgatcgtcagactagcgaagtttttgaagtacttgatggtttgatgttcaaggatggatttctgtataaaaaagttgcacttagttctttgatttattgggggatacaaccgacagaaacagagcttttgaaattctcttctaggatacaacatatattctag

SEQ ID NO: 28 - DNA, 453 bp, Zea mays
atgcttgtctctgaagggcagcacgtagctggaggtgctgggcaaacggagcaggagagaatcagatgcaccatggaggggtgcagtcaatttgggcttccatcttgttcagctccttccaatcaacgatacttcagttcatgggatgaggtgggattcttattcgtacagctccctctctgtgtttgctttgcatcccttgtacctgagggtacaagcactttcagatgcaattcctgtgttaaggaagaaattcaggaggcaaagaagcaattggataaaaaggatgtcgactacgaggcagcattgtccacaaaattgtcgattgctagaaaaatattcaatttagaaaaggaaaaagtgctaaactccagttctttccagcagttcttatctgaaaacgaggaatggttgaaaccatatgaggcattttgctttttgcgggacttctga

SEQ ID NO: 29 - DNA, 912 bp, Zea mays
atgaaagctactatgtttgcagcacagtcaattcaattgggtatcaatgatattgttgtggctggtggcatggaaagcatgtccaatgccccaaagtacattgctgaagctaggaaggggtctcgttttggtcatgacacacttgttgatgccatgcttaaggatgggctttgggatgtatacaatgattgtgccatgggaatgtgtgccgagctttgtgctgacaatcatgccctcacaagagaagaccaggatgcatttgctatccaaagcaatgagcgtggaattgctgctcgtgacagtggtgcttttgcatgggagattattccggttcaagttcctgttggtagaggaaaacccccaacattaattgagagagatgaaagcctggataagtttgacccagtaaaactaaagaaacttcgcccaagtttcaaggagaatgatggtacagttacagctggaaatgcttctagtataagtgatggagctgctgcattagttttggtgagtgggcagaaggctcaagagcttggccttcaagtccttgcaaggatcaaaggttatgctgatgcagctcaagctccggagctttttacaaccactccagcacttgcaataccaaaggctatcgcaaatgctggattagagtcatcccatgttgatttctatgagattaatgaagccttttcggctgttgcacttgcaaatcaaaagcttcttggaattccttcagaaaagattaatgttcatggaggagctgtatctttaggacatcctctcgggtgcagtggtgctcgcattttggttacccttattggtgttctcagggcgaagagtggcaagatcggagttgctggtgtctgcaacggtggaggcggagcatcagctcttgttctggagctcgcataa

SEQ ID NO: 30 - DNA, 1206 bp, Zea mays
atggcttccgacggcatcggccccagagatgtatgtgttgttggggttgcacgcaccccaatgggcggtttccttggtgccttgtctcccttgcctgctacgaaacttggctctatagtaattcaagctgctctggaaagagcaaacgtggatccagccctcgtgcaggaggtctactttggaaacgtcttgagtgctaatttggggcaagcgcctgcaaggcaagctgctctgggtgccgggataccaaactctgttgtttgcaccactgttaacaaagtctgtgcatctggcatgaaagctactatgtttgcagcacagtcaattcaattgggtatcaatgatattgttgtggctggtggcatggaaagcatgtccaatgccccaaagtacattgctgaagctaggaaggggtctcgttttggtcatgacacacttgttgatgccatgcttaaggatgggctttgggatgtatacaatgattgtgccatgggaatgtgtgccgagctttgtgctgacaatcatgccctcacaagagaagaccaggatgcatttgctatccaaagcaatgagcgtggaattgctgctcgtgacagtggtgcttttgcatgggagattattccggttcaagttcctgttggtagaggaaaacccccaacattaattgagagagatgaaagcctggataagtttgacccagtaaaactaaagaaacttcgcccaagtttcaaggagaatgatggtacagttacagctggaaatgcttctagtataagtgatggagctgctgcattagttttggtgagtgggcagaaggctcaagagcttggccttcaagtccttgcaaggatcaaaggttatgctgatgcagctcaagctccggagctttttacaaccactccagcacttgcaataccaaaggctatcgcaaatgctggattagagtcatcccatgttgatttctatgagattaatgaagccttttcggctgttgcacttgcaaatcaaaagcttcttggaattccttcagaaaagattaatgttcatggaggagctgtatctttaggacatcctctcgggtgcagtggtgctcgcattttggttacccttattggtgttctcagggcgaagagtggcaagatcggagttgctggtgtctgcaacggtggaggcggagcatcagctcttgttctggagctcgcataa

SEQ ID NO: 31 - protein, 86 aa, Zea mays
GVLAKLGELTEEEATTLLRVDAEIRALWQKLAYLQALVRGAGRQRRDRASELLLLWLRETREVAFAGGSAIHSGDGSSSQDYHIYT

SEQ ID NO: 32 - protein, 142 aa, Zea mays
MHSLLYRAPWVLFYTDCPQKAEFSNIWDTNKTAAPMIHREIVRFGYCESSSSKSSSDNSEERDECGIVDALVTTITQIRKMDLEARSLQPSIKAGLLAKLREYKSDLNNVKSELKRIFAPNARQATREELLEFGMADTLAVS

SEQ ID NO: 33 - protein, 199 aa, Zea mays
MAHFDELEDKTTDYVDLSVQEFALKQPQCGMAYNYYGNLRLYVVANKAELASSIFEIDKAGGPSAKRHGRRRGAGTRRCTRAARPALHRLHPLQRLHHLLHRGPTARLAGQAAEQRKKQKLSEIQSGVEEAESLIQKMDLEARSLQPSIKASLLAKLREYKSDLNNVKSELKRISAPNARQATREELLESGMADTLAVS

SEQ ID NO: 34 - protein, 339 aa, Zea mays
MTRTAHARKYQHAAGAFPSAAAHKSPVHSPALPQAAAALPVLLSREQSRAGSPASTRGHATPAETRHASTPRPSPDSEASTPHAPPRSRGPVLSSFFSVHRLLLLRSEGSICCAGDLHPPDAGHLTADSVALAPILEFPPPYPSRKRPPLDPVTELQGSNETNVTDVGAGEETEEGMHENRDEINALLDTDRQSGGAALSVESVASAGAAPPAAKKRRLSSCIDKSVVDTASSARPPERSMEQEQRVELANDRDAQSCCVGEVESGRRFALGEAEAEAAEGDSPDEQRRRRERIQETVAALRNMVPGGIAKDAAAVLDEAICYLQYLKLKVKTLGAVSL

SEQ ID NO: 35 - protein, 90 aa, Zea mays
MKGCLGKRPVFNVERLSTSVVSPWMGSLALGSMESAMQELQVGGRDSSAPCGLTHAAASVPDEAMSKISKPGQTLGLLRASRLGTPSCWQ

SEQ ID NO: 36 - protein, 346 aa, Zea mays
MGFRCGRASSSLLCEEDVAGMFGCNGHDDEEVGLLVLGMDTTFAALPSQSDEVVASLMEKEKEQLHSVATGDYLQRLSSGGLESSCRIAAIDWIKKAQAYHDFGPLSAYLAVNYLDRVLSTNQVPADADHQPWMPQLLSVACLTIAAKIEETVVPRRLDIHQNQVPSEKYSFDLDAIQRMEIYVLDSLNWRMQAVTPFSYINYFVDKFTGEKPLSCGFISRCTDIILGSVEATKLLQFRPSEMAAAVVLSAAAESQVIAFSGVLLASNIPVNKENVRRCHEALQEVGLVKKKTDYSASPSRVLDASCFSFKTEDNQTAGSSQSQANNNGNYNQAYSPASKRTRLDI

SEQ ID NO: 37 - protein, 76 aa, Zea mays
MVALCAGRPHPWLLPRLRLHWEAVQDIIRRGGSDGVLDDLAFTPAARTGAKTSSCALVQPLPTGAEVITAPAGLMW

SEQ ID NO: 38 - protein, 202 aa, Zea mays
MFSLFYGLWKYVFAKDEFRVLILGVDRAGKTTLLEKLKSIYLKGEGLPPDRVVPTVGLNIGRIEDAKAKLVFWDLGGQVSLRTIWEKYYEEAHAIMYVIDAATASSFEDSKSALEKVIRHEHLRGAPLLIVANKQDLPGAIDEEELAKFLHKELDERTYTFQAVSAYDGRGIKSGIDWLVEQMEKSKRTETLQARAGVAGQI

SEQ ID NO: 39 - protein, 396 aa, Zea mays
MDFSTGGSVSGGGGGASDGPAQAERWLEIAEKLLAARDLVGCKRFAERSMEANPLLAGVDELLAVADVLLASQFMGPSGQPDPLAILQLPPGVSPDQAAVSRAFRRLALLLGPSNPHPGAEMALRLVNDAYAFLSDPSRRPPPPADPATGTPYSSQYPAAAAPASDTPEFWTACPFCCYVHQYPRSLIGRALKCPNAGCRRGFVASELPTPPTVVPGTEMYHCAWGFFPLGFPNAADLGANWKPFYKMFPWNTAPSGQGGGGRSHGNHGGRQPQNDSARGGSSRGRIKKTTARKKVGVGLRRRSLGVESGIDSSMLGQEGWAGDENAGDGRAEEVRRININEAAHATDGTGRVNVSGAGGVEDISNFHIDVDASEDILGNLHNMHFLRVDNLGRMI

SEQ ID NO: 40 - protein, 389 aa, Zea mays
MVVLSLSQGASGVGLGNFLEMGPLDVDLKPRNSTWLHKADLIFVDNPVGTGYSYVEDDSLFVTSDWQQAADMTTVVRALAKEVPTLASSPLFLVAESYGGKYAATLGASIARAVRAGELNVTLGGVAVGDSWISPEDFTLSYTPLLLSVSRLDDNAGDEANKKAETVKEQIVAGQWAASQKSWSSLLDFIDTKSGNVDVYNFMLDSGMDPVALLPVGSSSLMSSLQAMKKYSTYGQDSQPGSNTIDGIMNGVIKQKLKIIPKNFTWGQQSDSVYNALVNDFMKPRIDEIDELLSYGINVTVYNGQLDVICSTNGAEAWVQKLKWDGLRTFLSLPRQPLYCGASKGTKAFVRSHKNLHFYWILGAGHYVPADQPCIALSMISSITQSPAS

SEQ ID NO: 41 - protein, 535 aa, Zea mays
MGIENRVGANYHGADLMSHRRHISVRDQRNNASPILKRVSALALLATGPQRASQRHPPRPRSCIIIITRVFEFEDMDRPRCYSPLALHLLLCLVSLRACSAASITAGTPDESELWGYVEVRPKAHLFWWYYKSPQRTSTPSKPWPTVLWLQGGPGASGVGLGNFLEMGPLDVDLKPRNSTWLHKADLIFVDNPVGTGYSYVEDDSLFVTSDWQQAADMTTVVRALAKEVPTLASSPLFLVAESYGGKYAATLGASIARAVRAGELNVTLGGVAVGDSWISPEDFTLSYTPLLLSVSRLDDNAGDEANKKAETVKEQIVAGQWAASQKSWSSLLDFIDTKSGNVDVYNFMLDSGMDPVALLPVGSSSLMSSLQAMKKYSTYGQDSQPGSNTIDGIMNGVIKQKLKIIPKNFTWGQQSDSVYNALVNDFMKPRIDEIDELLSYGINVTVYNGQLDVICSTNGAEAWVQKLKWDGLRTFLSLPRQPLYCGASKGTKAFVRSHKNLHFYWILGAGHYVPADQPCIALSMISSITQSPAS

SEQ ID NO: 42 - protein, 399 aa, Zea mays
MASYSSRRPCNTCSTKAMAGSVVGEPVVLGQRVTVLTVDGGGVRGLIPGTILAFLEARLQELDGPEARLADYFDYIAGTSTGGLITAMLTAPGKDKRPLYAAKDINYFYMENCPRIFPQKSRLAAAMSALRKPKYNGKCMRSLIRSILGETRVSETLTNVIIPAFDIRLLQPIIFSTYDAKSTPLKNALLSDVCIGTSAAPTYLPAHYFQTEDANGKEREYNLIDGGVAANNPTMVAMTQITKKMLASKDKAEELYPVNPSNCRRFLVLSIGTGSTSEQGLYTARQCSRWGICRWLRNNGMAPIIDIFMAASSDLVDIHVAAMFQSLHSDGDYLRIQDNSLRGAAATVDAATPENMRTLVGIGERMLAQRVSRVNVETGSEVRTGDRRRKQCRCPRWAR

SEQ ID NO: 43 - protein, 372 aa, Zea mays
MASYSSRRPCNTCSTKAMAGSVVGEPVVLGQRVTVLTVDGGGVRGLIPGTILAFLEARLQELDGPEARLADYFDYIAGTSTGGLITAMLTAPGKDKRPLYAAKDINYFYMENCPRIFPQKSRLAAAMSALRKPKYNGKCMRSLIRSILGETRAKSTPLKNALLSDVCIGTSAAPTYLPAHYFQTEDANGKEREYNLIDGGVAANNPTMVAMTQITKKMLASKDKAEELYPVNPSNCRRFLVLSIGTGSTSEQGLYTARQCSRWGICRWLRNNGMAPIIDIFMAASSDLVDIHVAAMFQSLHSDGDYLRIQDNSLRGAAATVDAATPENMRTLVGIGERMLAQRVSRVNVETGSEVRTGDRRRKQCRCPRWAR

SEQ ID NO: 44 - protein, 87 aa, Zea mays
MHAADFAFLKHPKMFALPPQPHLPPHRARHDREPPQPVVADAVPVRAHGCTAHVDPHQEVVLEEEHPHPLASTDATTSPVNQFSLRS

SEQ ID NO: 45 - protein, 81 aa, Zea mays
MQAQQSPQTNPSNYSLSGQVSGQQTAPSGSVTGDEQKGYPGAHTIPMRQAIASTRPPQFRPSLSGQMRSNTGYPPSQTNLH

SEQ ID NO: 46 - protein, 241 aa, Zea mays
MGNMSDGKGVHMLQTRPPNNSIPVQTMQHHVQRPQTSSPVFGANSIHARPFPRPVGDPAAPFRPQMADSNPRAHLIQGAVTTVSGSVPTRSIVSGNAPVSLKPELFEGLRFDFTKGLNQKFFLSHSVFMGSLEVPAQGPETIKVPTAHYEFGANFLDPKLMLIGRVITDGRLNARVKCDLTDNLTLKVNAQFLESTLHLFVQGSDYRAQFQIGNNAFYGANYIQKDGGNDSFGSLMPCKIQ

SEQ ID NO: 47 - protein, 233 aa, Zea mays
MTSKGHAASLLCPLRSQPERRRRPSHLPLSGRTPRWPTRAALLQLCPLVRADVEFSPEDADMSNREFLYHILEEVIKVGATTLNIPDTVEYTLPYEFGKLISDIKENTLRIENAIISTHCQNGLGLATANTLAGAHAGARLLEVTINGIGERAGNASLEEVVMAIKCRQELLDGLYTGINSQHITLTSKMVQEHNGLHVQPHEAIVGANAFAHESGIHQGGMLKYKGTYEIIS

SEQ ID NO: 48 - protein, 67 aa, Zea mays
MLRIRKGPLKGYLCRVVRIFRNDVTVKLDSLLKIVTVQADLLSVPANRGDNLSGAPTRATITYLFQI

SEQ ID NO: 49 - protein, 123 aa, Zea mays
MVSLCNVFQLDKLISEGTLHHDVIRFHYYVQYHLYIQGGAVSLKEATVPTPRLISSQELEFFRPHIEIKRDRQTSEVFEVLDGLMFKDGFLYKKVALSSLIYWGIQPTETELLKFSSRIQHIF

SEQ ID NO: 50 - protein, 150 aa, Zea mays
MLVSEGQHVAGGAGQTEQERIRCTMEGCSQFGLPSCSAPSNQRYFSSWDEVGFLFVQLPLCVCFASLVPEGTSTFRCNSCVKEEIQEAKKQLDKKDVDYEAALSTKLSIARKIFNLEKEKVLNSSSFQQFLSENEEWLKPYEAFCFLRDF

SEQ ID NO: 51 - protein, 303 aa, Zea mays
MKATMFAAQSIQLGINDIVVAGGMESMSNAPKYIAEARKGSRFGHDTLVDAMLKDGLWDVYNDCAMGMCAELCADNHALTREDQDAFAIQSNERGIAARDSGAFAWEIIPVQVPVGRGKPPTLIERDESLDKFDPVKLKKLRPSFKENDGTVTAGNASSISDGAAALVLVSGQKAQELGLQVLARIKGYADAAQAPELFTTTPALAIPKAIANAGLESSHVDFYEINEAFSAVALANQKLLGIPSEKINVHGGAVSLGHPLGCSGARILVTLIGVLRAKSGKIGVAGVCNGGGGASALVLELA

SEQ ID NO: 52 - protein, 401 aa, Zea mays
MASDGIGPRDVCVVGVARTPMGGFLGALSPLPATKLGSIVIQAALERANVDPALVQEVYFGNVLSANLGQAPARQAALGAGIPNSVVCTTVNKVCASGMKATMFAAQSIQLGINDIVVAGGMESMSNAPKYIAEARKGSRFGHDTLVDAMLKDGLWDVYNDCAMGMCAELCADNHALTREDQDAFAIQSNERGIAARDSGAFAWEIIPVQVPVGRGKPPTLIERDESLDKFDPVKLKKLRPSFKENDGTVTAGNASSISDGAAALVLVSGQKAQELGLQVLARIKGYADAAQAPELFTTTPALAIPKAIANAGLESSHVDFYEINEAFSAVALANQKLLGIPSEKINVHGGAVSLGHPLGCSGARILVTLIGVLRAKSGKIGVAGVCNGGGGASALVLELA

SEQ ID NO: 53 - DNA, 98 bp, Zea mays
gaaaagaaaaaggtattatgcaatactataagaatagccatgattattgcttagaaaataatgatcaaacaatctgtcaatattctagaaagaaaaaa

SEQ ID NO: 54 - DNA, 95 bp, Zea mays
ctcatttgttttttacaagttcagatccacttgcgtactcacacagtggacatctgttatgcacatgtgtaaaccagcataagaattaggaatta

SEQ ID NO: 55 - DNA, 162 bp, Zea mays
tgggattcgtcatctataggagttttgaatgcatttcccttggtatatatccaggcaaaaagaacaaaaaactcttggagtattctgatgccacttctgagttcattactgaaccagctgcacttacattggagatgttggtgaattgtacgatgaggaggc

SEQ ID NO: 56 - DNA, 102 bp, Zea mays
tttttttgtttcacattgaagctccctaattgttgcttctcgatgtgcagtggcctgattagctacaagaagctcttgttccatggactcgatctctggacc

SEQ ID NO: 57 - DNA, 440 bp, Zea mays
tggctcatataaaatgacctacaggctacaagcaggatggtaacataatatatcgccaaactatagaggtatttaacaaaattaaaatacaagattcattttttttcttatttgcatgggtgtttttagtaccttagctgccacttttactatattgtggctatctcaaagtggtttctgtattaaaaaatgaactctattaggaagctagagcagacttcagttacgcataaaagaaatgcaattgccgagacgtgataagcatttcaaatactcatattcaggtgattatcacaagtagacaagtagttacttgaaatcataggggtgcaagcagctgaaaataaacaaatgcttagtgtcatgcagtgtttttcaagagctagccaacttctaagttatactgattagaccgttgaggtccaaatgttgatgaaacc

SEQ ID NO: 58 - DNA, 114 bp, Zea mays
gtttttctttcactcctatgattttcctcaatatgatcaaaatgtttcttttgcaaataatgattgaaatgtttctcattgtactcaacctcttaaactacctataggctttgc

SEQ ID NO: 59 - DNA, 583 bp, Zea mays
cttcccgtccttctttctcgtgaacagagcagggcaggctcaccagccagcacgcgcggccacgccacacccgcggagacgcggcacgcctccactcctcggccctcccccgactccgaggcgagcacgccgcacgctccgcctcgcagtcgcggccccgtgctctcttccttcttctccgtccaccgtcttctccttcttcgctcggagggttcgatctggtaactctgttgagaagtgaagacttagcacagtctgtgctcgtcaagtgccctggcactctggcaggatgcggtggctcggtctttcggttgatgtgttccgcaggggggtctggtctccttcaacctttactgccgtgtgattctgtaggtcatccccgtgggtaccggaggagaccttcctttgcacgcctccactgattcatacagtaggattgtggagtactaatggtgtggagagcagctgctcagacgagattccacgtgtttaactaagcatgagaacggattcgcagtgagagttactgctcgcttccagtccagccgctgcaaaattgccaggtagttgtgtaataatctgt

SEQ ID NO: 60 - DNA, 123 bp, Zea mays
tttatattatgtttttatattaaatatgctaacttccgagagttaactgtttttaaaccgtagaaagttatgttaatacggttaattaacttaataagcaagatggtgcatgtaattgaatta

SEQ ID NO: 61 - DNA, 104 bp, Zea mays
tttttctttcttcttgtctactttaaatcatggcattagcaaagacatttgcgtgtatgggacaggtgatgcaatgatacagcataaaagaaggctaggcattg

SEQ ID NO: 62 - DNA, 552 bp, Zea mays
ctgctgacagaaccactgctgctgccatctcagaaggcctgaactgtaggagcttcgttgctgcaaatcaaatgcacacatacatctatttagaggcatgttccaatcatatagtaacaattgcttatcgaatggaaaaggcgggcaagtatgattcgctcatgcatgaagtaatctgatgtaccttcaacactgccaagtatgatatcggtgcaccgagaaatgaatccgcaacttagcggcttctcgccagtgaacttgtccacgaaatagttgatataagagaatggcgtcacagcttgcatcctccaattcagagagtctagaacgtaaatctccatcctctgaatagcatctaaatcgaaactgtacttctcgctaggaacctgtgacatatatatatataataaagataaagattttgggaactcaaacgtgaatctgtactgtatatccaattttgtccacctgattctgatggatgtccagacggcgaggaaccacagtctcctctatcttggctgcaatggttaggcaagcaacggacagcag

SEQ ID NO: 63 - DNA, 99 bp, Zea mays
tttggtcagttgtataatatatagttgaacacttgaactgagacttatatttgaatgacctaagatttatagatttgtagtcatagtcttgtatatttg

SEQ ID NO: 64 - DNA, 242 bp, Zea mays
aaaggttgagaaagcttggccaaaacaactcaaataaaaccccaaatcaagcttctcatgtggggacttaatgggaattctgaatttcagaattctgaaattcagaccttgagccaaagatcaaggatgttcaccttgatccctaactcgaatcctaatggccccattaacaaaaatgtgcctaactaacccctctgtcatgtgccaggagatggcattgggacgcgtgcctcggacatgtc

SEQ ID NO: 65 - DNA, 322 bp, Zea mays
atgtccctaactaacccctctgtcatgtgccaggagatggcattgggacgcgtgcctcggacacgtcaaaccagagatcttctccctgtgtgtggcagtgagacaaacaggatttctcccctctctatctcttaatccagtcagcgaaacttgctagcctccacacacaagcgacaaaggaaccttagaggaagagatctctcaacgggatcatggccataatctcaaaggtttgggcccaatccgcgcttgaacttgacctctctctgcgctgcctcgtgctcgacgctgtgccaggcgccagagcgcgcactggcgttcg

SEQ ID NO: 66 - DNA, 196 bp, Zea mays
gggtgtttgaatgcactagagctaatagttagtagctaaaattagttgagacatccaaacactttagttaatagttcaactattagctatttttggtaaattagttaatagttagatagttatttgttagctagctaattccactaccaatttttagccaactaactattagttctagtgcattcaaacaccccct

SEQ ID NO: 67 - DNA, 63 bp, Zea mays
aaaattcctggtatgccatcaaattttatactcattccttgtgtgccactgagtggcatatag

SEQ ID NO: 68 - DNA, 119 bp, Zea mays
tatttatcttatagggtatttgtgattataccctctctggtcttgaaattgtgattttacccatcgtttttcaactttgtgatattttatcccttcattttgaaaacgaagagttgcca

SEQ ID NO: 69 - DNA, 69 bp, Zea mays
taaaaaaacaagttccggcctctttacaatattttgtaatacgtagatcatatatgtttttatcggatc

SEQ ID NO: 70 - DNA, 641 bp, Zea mays
ctgctctgctctgctcccccaacgtcgatttggttcatcgagtcggagcccggagatggaacggaagcaaccttacgaacctccgagcgtgacgttgagctcgccagcgcggacggccctggcgatggacgcgccgagcgtggcggcgtacttgccgccgtaggactcggcgaccaggaacagcgggctgctcgccagggtgggcacctccttcgccagcgccctgaccaccgtcgtcatgtccgcggcctgctgccagtcgctggtcacgaacaggctgtcgtcctccacgtagctgtaccctgtgccgaccgggttgtcctgcgcgcgcgcccggccatggaagaagtcggtcagtgaggacatcacgacagcgaaaggtgtagaagaagagcggggggcagaagagaggatcggagaagagagccgccatcagctatcgctctctggtctgaccacaaagatgaggtcggccttgtggagccacgtcgagttgcgcggcttcaggtccacgtccagcggccccatctccaggaagttgccgagcccgaccccggacgcgccctgcgagagggacaagacaaccatggttgattactcgctcttgctcatcaggtagctagaccgtgctcccgtaatga

SEQ ID NO: 71 - DNA, 82 bp, Zea mays
ttagggggtgtttggttgctcctgctaaagtttagcccgggtcacatcaagcgtttgacttttaaataggagtatgaaatat

SEQ ID NO: 72 - DNA, 745 bp, Zea mays
gctggtcgagagagcccaggctcctggccgccgccgcaaaacagcttcaccgaccaccatggcgacaatgcctggatccctagttgccggcgttgaagacagagacgccccccgggacgaccgtgccactgatcggccaccgcgtccgcctgagaacaagaaagctcctccgtcatcgttcaccaaacagaccaaaccatttactcctggtgatccgaagctacttccccgaccaccatcaaagaacacttcggattcgaagaggcgctgcttgaagaaatctgcaactgagacacctggacgcaagtttcagatgtcaattgagagtggtggcagtagccaagctccaattagttcatagcctgaagctgaatcacgtcatgaatctattaatgaatcagaagcaattgaaatagaagatgaggagtgtgtagaagaagatggtgttgaggtaggttcaaagaggaagctcacatcagtcgtttggaaggagttcaagagagtgagatggaatggaaaaataaaggcaaaatgcaactattgcttcaccaagcttggaggcgaaacacgggctgggactaagcatttgcatgatcacttgaagtcttgcacacttaggaagataaagttggctgggaacaagacattgtcacaaacttctttgaggtttagtgccacagatgcagggacagtttcagtggaaaactacacatttgatcaggacatagctagaaaggaacttgct

SEQ ID NO: 73 - DNA, 830 bp, Zea mays
gctggtcgagagagcccaggctcctggccgccgccgcaaaacagcttcaccgaccaccatggcgacaatgcctggatccctagttgccggcgttgaagacagagacgccccccggtgaagaccttcttcctcctcctatcttcttattaaccttgcagcctctgccttctactgatgcccccgtccgtcccacctcaagggacgaccgtgccactgatcggccaccgcgtccgcctgagaacaagaaagctcctccgtcatcgttcaccaaacagaccaaaccatttactcctggtgatccgaagctacttccccgaccaccatcaaagaacacttcggattcgaagaggcgctgcttgaagaaatctgcaactgagacacctggacgcaagtttcagatgtcaattgagagtggtggcagtagccaagctccaattagttcatagcctgaagctgaatcacgtcatgaatctattaatgaatcagaagcaattgaaatagaagatgaggagtgtgtagaagaagatggtgttgaggtaggttcaaagaggaagctcacatcagtcgtttggaaggagttcaagagagtgagatggaatggaaaaataaaggcaaaatgcaactattgcttcaccaagcttggaggcgaaacacgggctgggactaagcatttgcatgatcacttgaagtcttgcacacttaggaagataaagttggctgggaacaagacattgtcacaaacttctttgaggtttagtgccacagatgcagggacagtttcagtggaaaactacacatttgatcaggacatagctagaaaggaacttgct

SEQ ID NO: 74 - DNA, 120 bp, Zea mays
ttttatttttttggatcatttctcactcagccaaccaatcaaaatctattctagacctggcagaattagttttgattttcaaaggatggacgataagtttaaggacatactacttctaag

SEQ ID NO: 75 - DNA, 123 bp, Zea mays
tttttgtttagggagttgttaaatgattgccaaatgtagagagaaaatgaggttagatgacaagttgttaaatttagaaagttcatttagagaactgttggagaatagtttttatgttaacta

SEQ ID NO: 76 - DNA, 119 bp, Zea mays
ttatttttttatgtggatagatacaaaacaaaattacaacctatatttagagaactattggagaactcacatttttttactccaaaagtcatttagcaacttcttaaatctacgattta

SEQ ID NO: 77 - DNA, 109 bp, Zea mays
agccttggactgttgctattatctagtggatccttaattagttcgtttttttaaaggaaagaaagctgctttccctctatctctgcttactaattcatatagggatccc

SEQ ID NO: 78 - DNA, 199 bp, Zea mays
ctttagcccctatcacatcgaatgtttgaacctccgttccgggtattaaatatagtcggattataaaactaatttgtcagccgaagattaaaagacgagacgaatctagtccagttggttgggtctatattgcatactcctatttgaaagtcaaacgcttgatgtgacccgtgctaaactttagcaggggcaaccaaac

SEQ ID NO: 79 - DNA, 471 bp, Zea mays
tgccactttgctctctagcagatgataattaatatggttgcagttgctgctcatgtctaaagacaatagatgctatcccagtagatgcacatcctatgacacagtttaccacattttcaaaccacattttcaatctgctctctatcttctgaaccggtaactgccttcttcaatatcgaccaccggccggtccacctcttcaataatcgtccttcatcccccttcagttgtgagttgtgacatactatttgtattcgaatctgatctattacaagtatacatggatattatagggtgtgcatctgtatacccatgttccttacaaggtccgtccctaggtgatatgagtagtaagtctaaacttgcttcttaccaagagttaggatgtatgtgtgtatgtattttttagtacaatagtattcaaaatttatgaggaccctttctttttgattgttttgaacaatgggcata

SEQ ID NO: 80 - DNA, 363 bp, Zea mays
ttttttattgtcctggtttatatgttagtctagtggattgcccagttacctggtttgctatgtttggttgtccgttgtatagtggtagattctgattccatattttgttgtgcacagggcgacgcagacagctccttggacaggctgtggcagaagaaggctgatatcaaccagtagattttacatctagtttaccaagaattggacactgccttagctatgttttgaattcatgtcactatatgcaatgttgtgatttcagctggtaccttaaatctgaagattccatagtttgatgtgtggtgttcgtttaattccctcgtacaaccccatttagtatcattgtgatgattttggattcaa

SEQ ID NO: 81 - DNA, 122 bp, Zea mays
tttcttttcatttttattacagggctagcaacataagttggatccaaattataatgttatgaagactctacaagctttactttttaaggaatactaggcgaagtctcttcaatacacgatcc

SEQ ID NO: 82 - DNA, 99 bp, Zea mays
aaatagtagggccatgtctcagttgacattcgtgaagcttcatgatgcccttttgacaagttcttaaatagaagtttagcttgctgcttatagaaatca

SEQ ID NO: 83 - DNA, 423 bp, Zea mays
taacacgtgcaaactaatttggtattgttcttgggaaactcatgtattatgcaacctacccataccctcttgatttagacttcattttctccaatattttactgtgatgtctctcaattagatttctcttaccgactttctactttttacttttgtttgatggcatgcatcctctaactaaagagccataaatgttagatttgaatgctatgtatttggctacaaaataggtattaactgttggcgatgttcctattggtagtgttacaaaagtattggtagtagggtaatgatgtaaatcattacacttaagtcatgtcacaggcatatagcctctgattcagtaattatgcaatgatatgctatataggattggaaacgagctgagcggctccgctcggtgcgactcgatggctgatcgag

SEQ ID NO: 84 - DNA, 125 bp, Zea mays
ttattttttggaatatttttgtagcaacctaaacatagttcatctatgcttagtttgggggtgggatggttaggcctagaagctaccgttgaattaatgagggcctaacccaaattaatattcaa

SEQ ID NO: 85 - DNA, 492 bp, Zea mays
ttaccatctatttcacagagtagagcatacccaagcagtctaaaaacaaatagagaaacaatgaagttgacaaaatgcaagcataatatatcagttaaaaatgcatgcataatacaataatataatttaactgtcaacaatgaaataggttgtccttcatatctgtcagctaaacaacatatggccgaaaaacaaggtctcagaaagactttgtaggacaaaaaggtctcagaaatatttcaagcagctaccttatactagaagcatttccagctgtaactgtaccatcattctccttgaaacttgggcgaagtttctttagttttactgggtcaaactaagacacaaaaggaatagcacaagacataaataaaactgtcatgcattgatcttacaaataactgctagcaaagctcattatgcgaggaacgttgcatttggaggaagcaagaacaataaatcaaagtgcctgccagtctttttgcctttgat

SEQ ID NO: 86 - DNA, 1527 bp, Zea mays
atggcgagctactcgtcgcggcgtccatgcaatacctgtagcacgaaggcgatggccgggagcgtggtcggcgagcccgtcgtgctggggcagagggtgacggtgctgacggtggacggcggcggcgtccggggtctcatcccgggaaccatcctcgccttcctggaggccaggctgcaggagctggacggaccggaggcgaggctggcggactacttcgactacatcgccggaaccagcaccggcggtctcatcaccgccatgctcaccgcgcccggcaaggacaagcggcctctctacgctgccaaggacatcaactacttttacatggagaactgcccgcgcatcttccctcagaagtgagtccgatgctgccgccattgttctcgcatccatccagcatcgtacgtcctctatacatctgcggatgatcatttgcgcatgtttgtggcatgcatgtgagcaggagcaggcttgcggccgccatgtccgcgctgaggaagccaaagtacaacggcaagtgcatgcgcagcctgattaggagcatcctcggcgagacgagggtaagcgagacgctgaccaacgtcatcatccctgccttcgacatcaggctgctgcagcctatcatcttctctacctacgacgtacgtacgtcgtcacgaatgattcatctgtacgtcgtcgcatgcgaatggctgcctacgccgtgcgctaacatactcagctctttccgatctgctgcgccaatttgcaggccaagagcacgcctctgaagaacgcgctgctctcggacgtgtgcattggcacgtccgccgcgccgacctacctcccggcgcactacttccagactgaagacgccaacggcaaggagcgcgaatacaacctcatcgacggcggtgtggcggccaacaacccggtaactgactagctaactgcaaaacgaacgcacagactccatgtccatggcggcccacaaggtcgatgctaattgttgcttatgtatgtcgcccgattgcacatgcgtagacgatggttgcgatgacgcagatcaccaaaaagatgcttgccagcaaggacaaggccgaggagctgtacccagtgaacccgtcgaactgccgcaggttcctggtgctgtccatcgggacggggtcgacgtccgagcagggcctctacacggcgcggcagtgctcccggtggggcatctgccggtggctccgcaacaacggcatggcccccatcatcgacatcttcatggcggccagctcggacctggtggacatccacgtcgccgcgatgttccagtcgctccacagcgacggcgactacctacgcatccaggacaactcgctccgtggcgccgcggcaaccgtggacgcggcgacgccggagaacatgcggacgctcgtcgggatcggggagcggatgctggcacagcgggtgtccagggtcaacgtggagacagggagcgaggtacgaaccggtgaccggagaaggaagcaatgccgatgccctcggtgggctcgctag

SEQ ID NO: 87 - DNA, 540 bp, Zea mays
atgccaagccttgacaagctcgaagtcagcgtgaacaaggtcgaggcattgtacaggttgttcaagaagatcagcagcaccttcattggcgatgggctgattaacaagataaggctagatgaggtggctatatctcacatggataccgtgtctccgcccgccgtggttggacggtcgtgcctggcccctcccccacgagattgccacccctcccgcctcgctcgtcgcagtgctgcccccggcgaggctgccgaaattgtcaccatcctccaccccgctcgctatggcgagtctcatgaggcactgaaatgtgtagatgttttcaaggagttccatcaaacaagaacgaagcacatgaagctgacatggatgggaacctgcaacgtaagtgcgaagtttgatgctaaccctattgagctcgttgttatgacatatcagaaaaaaggtgttgaaaatgttgacaaagacaggaggtatgcaattgatgcatcaattgtgtgcattatgaaggctgcaaagttatgggtcatcaacaactag

SEQ ID NO: 88 - DNA, 1104 bp, Zea mays
atggctggggctatctctcaccatgcgctagcattttcacaatcccactggtgcagtgcgaagaactctagattcggaaagaggacgggcaatgctcgcctggtttatctaaaaggaagatgtggttcaggcagcagaaaactgggtttgatgtgggcctcgagctcgcagtcttctgtcatggagccgacgcacctaccatctgatggcaacagcagccacaccccaaaaaaatcaagtgaaagcgctcttatattgatttggcatggtgaatccctgtggaacgagaaaaatctatttcctggctgcatcgatgtacccctgacaccgaagggtgttgaggaggccattgaggcaggtaaaaggatatgcaatatcccaatcgatgtgatatatacttcatcactgatttgtgctcagatgaccgcaatgcttgccatgatgcagcatcgacgcaagaagatcctagttatcacgcataatgagagtgaacaagctcacaggtggagtcagatatacagtgaggagacaatgaaacagtccattcctgtcatcacagcttggcaattgaatgaacggatgtatggtgagctacaaggccttaacaagcaagaaactgtagatcgatttggcaaagaacaagttcatgagtggcgccgcagttatgatattcctccgccaaatggagaaagtctagagaagtgtgctgagagagctgttgcttatttcaaagatcagattattccacaacttgtggctggaaaacatgtgatggttgctgcacatgggaattcacttcgttcaattataatgcatctggacaaattaacttctcagaaggtaataagccttgagctgtctactggcattcccatgctttacatattcaaagagggaaagtttattcgacgtgggactccagtaggaccttcggaggccagtgtttatgcttataccaggtctaaataccgaaggggattggagggactaaaatcctctccttattcaaaattgaataagaaaataactttaacccctccaatcccctccggtatcgtggctcccaaactagcgctaagagctgcagggccctcccctacatag

SEQ ID NO: 89 - protein, 179 aa, Zea mays
MPSLDKLEVSVNKVEALYRLFKKISSTFIGDGLINKIRLDEVAISHMDTVSPPAVVGRSCLAPPPRDCHPSRLARRSAAPGEAAEIVTILHPARYGESHEALKCVDVFKEFHQTRTKHMKLTWMGTCNVSAKFDANPIELVVMTYQKKGVENVDKDRRYAIDASIVCIMKAAKLWVINN

SEQ ID NO: 90 - protein, 367 aa, Zea mays
MAGAISHHALAFSQSHWCSAKNSRFGKRTGNARLVYLKGRCGSGSRKLGLMWASSSQSSVMEPTHLPSDGNSSHTPKKSSESALILIWHGESLWNEKNLFPGCIDVPLTPKGVEEAIEAGKRICNIPIDVIYTSSLICAQMTAMLAMMQHRRKKILVITHNESEQAHRWSQIYSEETMKQSIPVITAWQLNERMYGELQGLNKQETVDRFGKEQVHEWRRSYDIPPPNGESLEKCAERAVAYFKDQIIPQLVAGKHVMVAAHGNSLRSIIMHLDKLTSQKVISLELSTGIPMLYIFKEGKFIRRGTPVGPSEASVYAYTRSKYRRGLEGLKSSPYSKLNKKITLTPPIPSGIVAPKLALRAAGPSPT

SEQ ID NO: 91 - DNA, 1373 bp, Zea mays
tcagttcatcactaatcacacttattgtgccctcgacgagtatctatagctagctcattaatcgattcgggggtgtgttgtcgaaggcggcaatggcgagctactcgtcgcggcgtccatgcaatacctgtagcacgaaggcgatggccgggagcgtggtcggcgagcccgtcgtgctggggcagagggtgacggtgctgacggtggacggcggcggcgtccggggtctcatcccgggaaccatcctcgccttcctggaggccaggctgcaggagctggacggaccggaggcgaggctggcggactacttcgactacatcgccggaaccagcaccggcggtctcatcaccgccatgctcaccgcgcccggcaaggacaagcggcctctctacgctgccaaggacatcaaccacttttacatgcagaactgcccgcgcatctttcctcagaagagcaggcttgcggccgccatgtccgcgctgaggaagccaaagtacaacggcaagtgcatgcgcagcctgattaggagcatcctcggcgagacgagggccaagagcacgcctctgaagaacgctctgctctcggacgtgtgcattggcacgtccgccgcgccgacctacctcccggcgcactacttccagactgaagacgccaacggcaaggagcgcgaatacaacctcatcgacggcggtgtggcggccaacaacccgacgatggttgcgatgacgcagatcaccaaaaagatgcttgccagcaaggacaaggccgaggagctgtacccagtgaagccgtcgaactgccgcaggttcctggtgctgtccatcgggacggggtcgacgtccgagcagggcctctacacggcgcggcagtgctcccggtggggtatctgccggtggctccgcaacaacggcatggcccccatcatcgacatcttcatggcggccagctcggacctggtggacatccacgtcgccgcgatgttccagtcgctccacagcgacggcgactacctgcgcatccaggacaactcgctccgtggcgccgcggccaccgtggacgcggcgacgccggagaacatgcggacgctcgtcgggatcggggagcggatgctggcacagagggtgtccagggtcaacgtggagacagggaggtacgaaccggtgactggcgaaggaagcaatgccgatgccctcggtgggctcgctaggcagctctccgaggagaggagaacaaggctcgcgcgccgcgtctctgccatcaacccaagaggctctagatgtgcgtcgtacgatatctaagacaagtggctttactgtcagtcacatgcttgtaaataagtagactttattttaataaaacataaaaatatatat

SEQ ID NO: 92 - protein, 401 aa, Zea mays
MASYSSRRPCNTCSTKAMAGSVVGEPVVLGQRVTVLTVDGGGVRGLIPGTILAFLEARLQELDGPEARLADYFDYIAGTSTGGLITAMLTAPGKDKRPLYAAKDINHFYMQNCPRIFPQKSRLAAAMSALRKPKYNGKCMRSLIRSILGETRAKSTPLKNALLSDVCIGTSAAPTYLPAHYFQTEDANGKEREYNLIDGGVAANNPTMVAMTQITKKMLASKDKAEELYPVKPSNCRRFLVLSIGTGSTSEQGLYTARQCSRWGICRWLRNNGMAPIIDIFMAASSDLVDIHVAAMFQSLHSDGDYLRIQDNSLRGAAATVDAATPENMRTLVGIGERMLAQRVSRVNVETGRYEPVTGEGSNADALGGLARQLSEERRTRLARRVSAINPRGSRCASYDI

SEQ ID NO: 93 - DNA, 222 bp, Zea mays
atggtgcacggcggtggattcagtggtgggagcacggggaagaagtgggtgagccccgcctttatccacagagccatcggggttgagaacgtggcgagcgactccggagaaaggggaaagaagaccgcgctgcccaccatggtcgggattcagttggcggtgaagatgaacacgctgacgcgcgggcccgggtttccagtgagccgagctatcggcagctga

SEQ ID NO: 94 - DNA, 306 bp, Zea mays
atggataccgtgtctccgcccgccgtggttggacggtcgtgcctggcccctcccccacgagattgccacccctcccgcctcgctcgtcgcagtgctgcccccggcgaggctgccgaaattgtcaccatcctccaccccgctcgctatggcgagtctcatgaggcactgaaatgtgtagatgttttcaaggagttccatcaaacaagaacgaagcacatgaagctgacatggatgggaacctgcaacgtaagtgcgaagtttgatgctaaccctattgagctcgttgttatgacatatcaggcttag

SEQ ID NO: 95 - DNA, 990 bp, Zea mays
atggctggggctatctctcaccatgcgctagcattttcacaatcccactggtgcagtgcgaagaactctagattcggaaagaggacgggcaatgctcgcctggtttatctaaaaggaagatgtggttcaggcagcagaaaactgggtttgatgtgggcctcgagctcgcagtcttctgtcatggagccgacgcacctaccatctgatggcaacagcagccacaccccaaaaaaatcaagtgaaagcgctcttatattgatttggcatggtgaatccctgtggaacgagaaaaatctatttcctggctgcatcgatgtacccctgacaccgaagggtgttgaggaggccattgaggcaggtaaaaggatatgcaatatcccaatcgatgtgatatatacttcatcactgatttgtgctcagatgaccgcaatgcttgccatgatgcagcatcgacgcaagaaggtttttatcacgcataatgagagtgaacaagctcacaggtggagtcagatatacagtgaggagacaatgaaacagtccattcctgtcatcacagcttggcaattgaatgaacggatgtatggtgagctacaaggccttaacaagcaagaaactgtagatcgatttggcaaagaacaagttcatgagtggcgccgcagttatgatattcctccgccaaatggagaaagtctagagaagtgtgctgagagagctgttgcttatttcaaagatcagattattccacaacttgtggctggaaaacatgtgatggttgctgcacatgggaattcacttcgttcaattataatgcatctggacaaattaacttctcagaaggtaataagccttgagctgtctactggcattcccatgctttacatattcaaagagggaaagtttattcgacgtgggactccagtaggaccttcggaggccagtgtttatgcttataccagggtaagattctttcccccacatgttctaccatag

SEQ ID NO: 96 - DNA, 312 bp, Zea mays
atgtttcataatccatttgtaatcctggccatacataaattttgttattttaatttagctgtttcactactacattgcaaccatcagtatcatgcagacttcgatatatgtcacgatttgcatagtcttatcattgaagagcacgtgtcacacctaccggtagaagttccctcgtacattgtcagggggacctcatggtcgtcgctaaagccggcgactctctggttgttctgggcaccgcatccgacgacaacaccgtcacgctgtccagctcatcatccacctgaagatcaacctgccacatgtatgtaa

SEQ ID NO: 97 - DNA, 194 bp, Zea mays
atgtcgtgcgtgttcgacgactactatatcaaggactgtggcgtcctcttggcgccagaggtgaggagtaccgacagcaatgacctctcgccatcgtcgggtgagtatagtggtgcgtacctgatgactgacaatgtacgaggaaacttctactggcaggtgtggcacgtgctcttcaatgatgagaccatgta

SEQ ID NO: 98 - DNA, 393 bp, Zea mays
atgatggatggatgcaagaacaatgacgccagatggaattcacttttgagggaagacatgtgggctgttctccatgtagaagtggttgatgtccttggcaacgtagagagaccgcttgtttttgccggtcccgatgaacatggcggtgatgatctcatcggtgctattcctagtgatgtagtcgaagtagtccgcgagccttgccttcgtcccgtccaactcctacggcatggcctcgaggaaggtgaggatggttcccgagatgagaccccagatggcgcctctgtccaccgttatcactgtcaccctcggttcaacacgacgggctcatcgaccatgctcccggccatcgccttcgtgctgcatgtgttgcatggacgccttgatgagtag

SEQ ID NO: 99 - DNA, 234 bp, Zea mays
atggatggcgatggtatccggggtctcatcccggaaaccattcttgccttcctcgaggcgagggtgcaggatctggacaggctggaggcgaggctcgcagactacttcgactacatcgccaggaccggtgggctcgtcatcacgctgctcacttcgcccggcaaggacaagcggcctctctacgttgccaagaacatcaaccacttgttcttgcatccattcacatcgccctaa

SEQ ID NO: 100 - protein, 73 aa, Zea mays
MVHGGGFSGGSTGKKWVSPAFIHRAIGVENVASDSGERGKKTALPTMVGIQLAVKMNTLTRGPGFPVSRAIGS

SEQ ID NO: 101 - protein, 101 aa, Zea mays
MDTVSPPAVVGRSCLAPPPRDCHPSRLARRSAAPGEAAEIVTILHPARYGESHEALKCVDVFKEFHQTRTKHMKLTWMGTCNVSAKFDANPIELVVMTYQA

SEQ ID NO: 102 - protein, 329 aa, Zea mays
MAGAISHHALAFSQSHWCSAKNSRFGKRTGNARLVYLKGRCGSGSRKLGLMWASSSQSSVMEPTHLPSDGNSSHTPKKSSESALILIWHGESLWNEKNLFPGCIDVPLTPKGVEEAIEAGKRICNIPIDVIYTSSLICAQMTAMLAMMQHRRKKVFITHNESEQAHRWSQIYSEETMKQSIPVITAWQLNERMYGELQGLNKQETVDRFGKEQVHEWRRSYDIPPPNGESLEKCAERAVAYFKDQIIPQLVAGKHVMVAAHGNSLRSIIMHLDKLTSQKVISLELSTGIPMLYIFKEGKFIRRGTPVGPSEASVYAYTRVRFFPPHVLP

SEQ ID NO: 103 - protein, 103 aa, Zea mays
MFHNPFVILAIHKFCYFNLAVSLLHCNHQYHADFDICHDLHSLIIEEHVSHLPVEVPSYIVRGTSWSSLKPATLWLFWAPHPTTTPSRCPAHHPPEDQPATCM

SEQ ID NO: 104 - protein, 64 aa, Zea mays
MSCVFDDYYIKDCGVLLAPEVRSTDSNDLSPSSGEYSGAYLMTDNVRGNFYWQVWHVLFNDETM

SEQ ID NO: 105 - protein, 130 aa, Zea mays
MMDGCKNNDARWNSLLREDMWAVLHVEVVDVLGNVERPLVFAGPDEHGGDDLIGAIPSDVVEVVREPCLRPVQLLRHGLEEGEDGSRDETPDGASVHRYHCHPRFNTTGSSTMLPAIAFVLHVLHGRLDE

SEQ ID NO: 106 - protein, 77 aa, Zea mays
MDGDGIRGLIPETILAFLEARVQDLDRLEARLADYFDYIARTGGLVITLLTSPGKDKRPLYVAKNINHLFLHPFTSP

SEQ ID NO: 107 - DNA, 1538 bp, Oryza sativa
acagtgactagtgacaaacgatcgatcgatccctccatccacaaaccctcctcgatctcatcttccttcgtctcgtcaatggcggcgagctactcgtgccggcggacatgcgaggcgtgcagcacgagggcgatggccgggtgcgtggtgggcgagccggcgtcggcgccggggcagcgggtgacgttgctggcgatcgacggcggcggcatcaggggcctcatcccgggcaccatcctcgccttcctcgaggccaggctgcaggagctggatggccccgacgcgcgcctcgccgattacttcgactgcatcgccgggaccagcaccggcggcctcatcaccgccatgctcgccgcgcccggcgaccacggccgcccgctcttcgccgccagcgacatcaaccgcttctacctcgacaacggcccactcatcttcccacaaaagaggtgcggcatggcggcggccatggcggcgctgacgaggccgaggtacaacggcaagtacctgcaggggaagatcaggaagatgctgggcgagacgagggtgcgcgacacgctgacgaacgtcgtcatccccacgttcgacgtcaggctgctccagccaaccatcttctccacatacgacgcgaagagcatgccgctcaagaacgcgctcctctccgacatctgcatcagcacatccgcggcgccgacctacctccccgcgcactgcttccagaccaccgacgacgccaccggcaaggtccgcgagttcgacctcatcgacggcggcgtcgccgccaacaacccgacgatggtggccatgacgcagatcaccaagaagataatggtgaaggacaaggaggagctgtacccggtaaagccgtcggactgcggtaagttcctggtgctgtccgtgggcaccgggtcgacgtcggaccaggggatgtacacggcgaggcagtgctcgcggtgggggatcgtccggtggctgcgcaacaaggggatggcgcccatcatcgacatcttcatggcggccagctccgacctcgtcgacatccacgccgccgtcatgttccagtcgctgcacagcgacggcgactacctccgcatccaggacaacacgctccacggcgacgccgccacggtggacgccgccaccagggacaacatgcgggcgctcgtcgggatcggcgagcggatgctggcgcagcgggtgtcgagggtcaacgtcgagaccggcaggtacgtcgaggtgcccggcgccggcagcaacgccgacgcgctgaggggcttcgccaggcagctctccgaggagaggagggcgaggctaggtcggcgaaacgcctgcggcggcggcggcgaaggagagcccagcggcgtggcgtgcaagcgttagtaactgtacacgcatcatgctgacgcgatcttttttatttttctttttttttttttacctttctagcggacatggggaataacaagacgtgacagtagtgcaatcggtttgtaacgtgcgtataccaacattgatccatttcttcatcacagtttcagttc

SEQ ID NO: 108 - protein, 432 aa, Oryza sativa
MAASYSCRRTCEACSTRAMAGCVVGEPASAPGQRVTLLAIDGGGIRGLIPGTILAFLEARLQELDGPDARLADYFDCIAGTSTGGLITAMLAAPGDHGRPLFAASDINRFYLDNGPLIFPQKRCGMAAAMAALTRPRYNGKYLQGKIRKMLGETRVRDTLTNVVIPTFDVRLLQPTIFSTYDAKSMPLKNALLSDICISTSAAPTYLPAHCFQTTDDATGKVREFDLIDGGVAANNPTMVAMTQITKKIMVKDKEELYPVKPSDCGKFLVLSVGTGSTSDQGMYTARQCSRWGIVRWLRNKGMAPIIDIFMAASSDLVDIHAAVMFQSLHSDGDYLRIQDNTLHGDAATVDAATRDNMRALVGIGERMLAQRVSRVNVETGRYVEVPGAGSNADALRGFARQLSEERRARLGRRNACGGGGEGEPSGVACKR

SEQ ID NO: 109 - DNA, 1617 bp, Sorghum bicolor
atggcgacctactactcttcgcggcgtccatgcaacgcctgcagcacgaaggcgatggccgggagcgtggtcggcgagcccgtcgtgctggggcagagggtgacggtgctgacggtggacggcggcggcatccgtggtctcatccccggaaccatccttgccttcctcgaggcccggctgcaggagctggacgggccggaggttaggctcgcggactacttcgactacatcgccgggacgagcaccggcgggctcatcaccgccatgctcaccgcgcccggcaaggacaggcggcctctctacgctgccaaggacatcaaccaattctacatggagaattgccctcgcatcttccctcaaaagtgagtccgatcatcccggccggccgccattgttggcctcgcatgattgatcgatcatgcatgcatgcatgcatgtgatgtgtaggagcagcaggcttgcggccgccatgtccgcgctgaggaagccaaggtacaacggcaagtgcctccgtaacctgatcatgagcatgctcggcgagacgagggtgagcgacacgctcaccaacgtcatcatccctaccttcgacgtcaggctgctgcagcccatcatcttctccacctacgacgtacgtacgccgccggccgccgtcgtcatgaataatcaatcagctgtacattattgcacatggctgcatgcctactgaacatgtttaatttgcaggccaagagcatgcctctgaagaacgcgctgctctccgacgtgtgcatcggcacgtccgccgcgccgacctacctcccggcgcactacttccagaccaaggacgccggcagtggcaaggaacgcgagtacaacctcatcgacggcggtgtcgccgccaacaatccggtaattaattaactgaaaacgaacgaacgcaattccatatccattgtccagaagatcgatgctaattgttgcttaggcacgtcgttgccgccggccgattgcattgcacttgcacatgcgtagacgatggttgcgatgacgcagatcaccaagaagatgcttgccagcaaggagaaggccgaggagctgtacccagtgaagccgtggaactgccgcaagttcctggtgctgtccatcgggacggggtcgacgtcggagcagggcctgtacacggcgcggcagtgctcgcggtggggcatctgccggtggatccggaacaacggcatggcccccatcatcgacatcttcatggcggcgagctcggacctggtggacatccacgtcgccgcgatgttccagtcgctccacagcgacggcgactacctgcgcatccaggacaactcgctgcacggcgccgcggccaccgtggacgcggcgacgccggagaacatgcggacgctcgtcgggatcggggagcggatgctggcgcagcgggtgtccagggtcaacgtggagacagggaggtacgaaccggtgcctggggaaggaagcaacgctgatgcgctcgctgggatcgcaaggcagctctcggaggagaggaggacaaggctcgcgcgccgcacctccgccatcgtcagctccggtggtgcctctagacgtacgtgtgcctcaaaggtctccaatgtctaa

SEQ ID NO: 110 - protein, 437 aa, Sorghum bicolor
MATYYSSRRPCNACSTKAMAGSVVGEPVVLGQRVTVLTVDGGGIRGLIPGTILAFLEARLQELDGPEVRLADYFDYIAGTSTGGLITAMLTAPGKDRRPLYAAKDINQFYMENCPRIFPQKSSRLAAAMSALRKPRYNGKCLRNLIMSMLGETRVSDTLTNVIIPTFDVRLLQPIIFSTYDAKSMPLKNALLSDVCIGTSAAPTYLPAHYFQTKDAGSGKEREYNLIDGGVAANNPTMVAMTQITKKMLASKEKAEELYPVKPWNCRKFLVLSIGTGSTSEQGLYTARQCSRWGICRWIRNNGMAPIIDIFMAASSDLVDIHVAAMFQSLHSDGDYLRIQDNSLHGAAATVDAATPENMRTLVGIGERMLAQRVSRVNVETGRYEPVPGEGSNADALAGIARQLSEERRTRLARRTSAIVSSGGASRRTCASKVSNV

SEQ ID NO: 111 - DNA, 325 bp, Zea mays
ggcagagccgtgcccgtctcatcccctgcccgtgcaagcagctaggtaggacgatttgagcgtggtgttaggccgaaccgctgaaggaagattgctccactgttgactgcattaacaacgagctcaatagggaaaatgtattgcttatattcagcaatataatgttctccctattgctatcgttgttaatatagtcgatagtggaagaacggtaacatatgtggtttgcagcaggtgagcaggatgggtgtggatgattgaatatctctgttcagtgttttcatcatctgactgaacactgaatcagcttgctgacgttagaggt

SEQ ID NO: 112 - DNA, 325 bp, Zea mays
ggcagagccgtgcccgtctcatcccctgcccgtgcaagcagctaggtaggacgatttgagcgtggtgttaggccgaaccgctgaaggaagattgctccactgttgactgcattaaacactggcctccgaaggaaaatgtattgcttatattcagcaatataatgttctccttcggattacagtgtttaatatagtcgatagtggaagaacggtaacatatgtggtttgcagcaggtgagcaggatgggtgtggatgattgaatatctctgttcagtgttttcatcatctgactgaacactgaatcagcttgctgacgttagaggt
